(19) United States
(12) Patent Application Publication
(10) Pub. No.: US 2021/0290676 A1
(43) Pub. Date: Sep. 23, 2021

(54) IMPROVING THE EFFICACY AND SAFETY OF ADOPTIVE CELLULAR THERAPIES

(71) Applicant: University of Southern California, Los Angeles, CA (US)

(72) Inventor: Preet M. Chaudhary, Toluca Lake, CA (US)

(21) Appl. No.: 17/264,788

(22) PCT Filed: Jul. 30, 2019
(86) PCT No.: PCT/US2019/044255

§ 371 Date: Jan. 29, 2021

Related U.S. Application Data
(60) Provisional application No. 62/712,102, filed on Jul. 30, 2018.

(51) Int. Cl. A61K 35/17; A61K 31/496; C07K 14/705; C07K 14/725

(52) U.S. Cl. CPC A61K 35/17; A61K 31/496; C07K 14/70578; C07K 2319/33; C07K 2317/76; C07K 2319/03; C07K 14/7051

(57) ABSTRACT

The disclosure relates generally to the generation and use of immune effector cells (e.g., T cells, NK cells) engineered to express an immune receptor (e.g., Chimeric Antigen Receptor, Synthetic Immune Receptor, T Cell Receptor etc.) to treat a disease associated with expression of a target antigen.

### CROSS REFERENCE TO RELATED APPLICATIONS

[0001] This application claims priority of U.S. Provisional Application No. 62/712,102, filed Jul. 30, 2018, the disclosures of which are incorporated herein by reference in their entirety.

### SEQUENCE LISTING

[0002] The instant application contains a Sequence Listing which has been submitted electronically in ASCII format and is hereby incorporated by reference in its entirety. Said ASCII copy entitled “SEQ-1-3059_ST25”, created on Jul. 30, 2019, and is 4,053,956 bytes in size.

### FIELD OF THE INVENTION

[0003] The disclosure relates generally to the use of immune effector cells (e.g., T cells, NK cells) engineered to express a Chimeric Antigen Receptor (CAR) to treat a disease associated with expression of a tumor antigen.

### BACKGROUND

[0004] Adoptive cell transfer (ACT) therapy with immune-cells, especially with T-cells transduced with Chimeric Antigen Receptors (CARs) and recombinant TCRs, has shown promise in hematologic malignancies and solid tumor trials. However, there is high rate of failure in the manufacturing of cell therapy products, resulting in poor yield, poor proliferation, expansion and tissue (e.g., tumor) penetration of the product upon administration, poor efficacy and increased cost.

[0005] There is also a medical need for cell therapies (e.g., immune cell therapies, e.g., CAR-T, SIR-T, Ab-TCR-T, TFP-T, TILs or TCR-T) with improved efficacy and reduced toxicity. The efficacy of adoptive immune therapy with T cells expressing conventional and next generation chimeric antigen receptors, (e.g., SIR, zSIR, AbTCR, and TFP) and native (e.g., Tumor Infiltrating Lymphocytes) or engineered T cell receptors (e.g., NY-ESO-1 TCR), correlates well with the expansion and proliferation of the T cells when infused into the patient. Thus, patients showing robust in vivo expansion of the adoptively transferred T cells have better chance of showing disease response as compared to the patients in whom the adoptively transferred T cells either fail to expand or do so poorly. Failure of expansion of infused T cells is a bigger problem in adoptive immunotherapy of solid tumors as compared to hematologic malignancies and may play a role in the overall inferior response of solid tumors to adoptive immune therapies. Strategies to improve the in vivo expansion of adoptively transferred T cells include administration of lymphodepleting chemotherapy. For example, fludarabine and cyclophosphamide are commonly administered to the patients prior to infusion of adoptively transferred T cells. However, administration of lymphodepleting chemotherapy is associated with significant toxicities (e.g., pancytopenia, fever, risk of infection, neurotoxicity) and death. Additionally, adoptively transferred T cells fail to expand despite the administration of lymphodelpeting chemotherapy. A related problem with adoptively transferred immune cells is excessive stimulation and proliferation, which is associated with toxicities such as cytokine release syndrome, neurotoxicity, including death. Additionally, over-stimulation and proliferation of adoptively transferred T cells have been associated with early T cell exhaustion and disease relapse.

[0006] Accordingly, the need exists to improve the yield, expansion, activation, proliferation, expansion, diversity, tissue (e.g., tumor) penetrance, persistence, efficacy and safety of cell therapy products, e.g., immune cell therapy products, e.g., CAR-T, SIR-T, TFP-T, Ab-TCR-T and TCR-T products etc. In particular, there is a need to for new methods to improve the manufacturing of cell therapy products to improve yield, reduce manufacturing time, improve in vivo expansion and efficacy and reduce cost. In addition, the need exists for a method in which the expansion, activation and proliferation of adoptively transferred immune cells can be controlled after infusion to a subject. Finally, the need exists to improve the penetration of adoptively transferred cells to the sites of disease, e.g., tumor.

### SUMMARY

[0007] The disclosure relates to a method of improving the yield, expansion, activation, proliferation, expansion, diversity, tissue (e.g., tumor) penetrance, persistence, efficacy and safety of cell therapy products, e.g., immune cell therapy products, e.g., CAR-T, SIR-T, TFP-T, Ab-TCR-T and TCR-T products etc. The disclosure related to improving the yield, expansion, activation, proliferation, expansion, diversity, tissue (e.g., tumor) penetrance, persistence and efficacy of immune cell therapies, such as engineered CAR-T, TCR-T, SIR-T, Ab-TCR-T cell therapies or NK cell therapies, by using mobilized immune cells for the manufacturing of cell therapy products. In various embodiments, the method involves mobilizing immune cells prior to collecton of immune cells (e.g. leukopheresis) from the donor. In various embodiments, the immune cells are mobilized by administrating to the donor from whom the immune cells are harvested a CXCR antagonist (e.g., Mozibil or Plerixafor), a cytokine (e.g., G-CSF, GM-CSF or sargramostim, Neulasta or Pegfilgastrim), a beta2 adrenergic agonist (e.g., epinephrine), a tyrosine kinase inhibitor (e.g., dasatinib), chemotherapy drug(s) (e.g., cyclophosphamide, doxorubicin) or a combination of the above agents prior to the collection of immune cells. In various embodiments, the immune cells are mobilized by making the subject (i.e. donor) exercise. In some embodiments, the immune cells are mobilized from an autologous donor. In other embodiments, the immune cells are mobilized from an allogeneic donor.

[0008] The disclosure also pertains, at least in part, to methods for improving the expansion and/or activation (e.g., in vitro and in vivo expansion and/or activation) of immune cells, e.g., immune T cells, e.g., CAR-T cells or TCR-T cells or TILs or NK cells or CAR-NK cells or macrophage cells or macrophage-CAR cells, for the purpose of adoptive cellular therapy. Some embodiments described herein provide for expansion and/or activation of immune cells by exposing them to a bispecific or multi-specific engager that contains at least one antigen binding domain capable of engaging the immune cells and at least one antigen binding domain capable of engaging an antigen presenting cell (APC) or antigen presenting substrate (APS), e.g. antigen-conjugated beads.

[0009] The disclosure also pertains, at least in part, to methods for improving the expansion and/or activation (e.g., in vitro and in vivo expansion and/or activation) of immune cells, e.g., immune T cells, e.g., CAR-T cells CAR-NK cells or macrophage-CAR cells, for the purpose of adoptive cellular therapy. Some embodiments described herein provide for expansion and/or activation of immune cells by culturing with cells and/or cell lines derived from Mantle cell lymphoma. Exemplary cell lines derived from Mantle cell lymphoma include, but are not limited to, REC-1, MINO, JEKO-1, and GRANTA-519. In a preferred embodiment, the immune cells, e.g., T cells, express a CAR targeting an antigen (e.g., CD19, CD20, CD22 and BCMA) expressed on B and plasma cell lineage cells, and are expanded/activated by co-culturing with REC-1 cells.

[0010] The disclosure also relates to methods for preventing or ameliorating toxicity caused by or due to a therapy, e.g., cell therapy or immune therapy, e.g., CAR-T therapy or Blinatumomab therapy, by interfering with and/or blocking the activity of TRAIL (TNFSF10). In some embodiments, the therapy involves a bispecific or multispecific engager that activates immne cells, e.g., T cells. Exemplary bispecific engager that activate immune cells include Blinatumomab, CD3×CD123 DART and BCMA×CD3 BiTE. In some embodiments, the therapy is a cell therapy in which the cells generally express recombinant receptors such as chimeric receptors, e.g., chimeric antigen receptors (CARs) or other transgenic receptors such as T cell receptors (TCRs).

[0011] In some embodiments, the activity of TRAIL is interfered or blocked by administering a TRAIL/TNFSF10 antagonist. In some embodiments, the TRAIL antagonist is an antibody, an antibody fragment, a small molecule, a peptide or a nucleic acid. In some embodiments, the TRAIL antagonist is an agent that binds to TRAIL (TNFSF10) or its receptors Death Receptor 5 (DR5 or TNFRSF10B), or Death Receptor 4 (DR4 or TNFRSF10A), such as an antibody, an antibody fragment or a non-immunoglobulin antigen binding scaffold such as a DARPIN, an affibody, an affilin, an adnectin, an affitin, an obodies, a repebody, a fynomer, an alphabody, an avimer, an atrimer, a centyrin, a pronectin, an anticalin, a kunitz domain, an Armadillo repeat protein or a fragment thereof.

[0012] In some embodiments, the TRAIL antagonist is a soluble TRAIL receptor (e.g., DR5-SP-ECD-hIgFc; SEQ ID NO: 2428, DR4-SP-ECD-hIgFc; SEQ ID NO: 2441, DcR1-SP-ECD-hIgFc; SEQ ID NO: 2448; or DcR2-SP-ECD-hIgFc; SEQ ID NO; 2455). In some embodiment, the TRAIL antagonist is a nucleic acid targeting TRAIL (e.g, a shRNA targeting TRAIL or a gRNA targeting TRAIL) or its receptor DR5 (e.g, a shRNA targeting DR5 or a gRNA targeting DR5) and DR4 (e.g, a shRNA targeting DR4 or a gRNA targeting DR4). The target sequence for gRNAs targeting TRAIL (SEQ ID NO: 2060-2109), DR4 (SEQ ID NO: 2111-2160) and DR5 (SEQ ID NO: 2162-2211) are provided in the disclosure. The target sequence for shRNAs targeting TRAIL (SEQ ID NO: 2213-2216), DR4 (SEQ ID NO: 2217-2220) and DR5 (SEQ ID NO: 2221-2224) are provided in the disclosure. The sequence of shRNA constructs targeting TRAIL (SEQ ID NO: 2226-2230), DR4 (SEQ ID NO: 2231-2233) and DR5 (SEQ ID NO: 2234-2237) are also provided in the disclosure.

[0013] In some embodiments, the TRAIL antagonist is a small molecule compound that interferes with signal transduction pathways activated by binding of TRAIL to its receptors DR5 or DR4. In some embodiments, the TRAIL antagonist is an agent that alters the expression of TRAIL or its receptors. In some embodiments, the TRAIL antagonist is an agent that down-regulates the expression of TRAIL or its receptors DR5 and/or DR4. As an example, a TRAIL antagonist may interfere with the expression of TRAIL, DR5 and/or DR4 at the transcription, post-transcription, translation, or post-transplation levels. In some embodiments, the TRAIL antagonist is included in the manufacturing of cell therapy products. In other embodiments, the cell therapy product is exposed to TRAIL antagonist prior to administration to a subject. In other embodiments, the TRAIL antagonist is incorporated into the cell therapy product. In exemplary embodiments, a cell therapy products (e.g., CAR-T cell product, TCR-T product or TIL), may be genetically engineered to express a) a soluble TRAIL receptor (e.g., DR5-SP-ECD-hIgFc; SEQ ID NO: 2428, DR4-SP-ECD-hIgFc; SEQ ID NO: 2441, DcR1-SP-ECD-hIgFc; SEQ ID NO: 2448; or DcR2-SP-ECD-hIgFc; SEQ ID NO; 2455); b) a scFV targeting TRAIL, DR5 and/or DR5; c) an shRNA targeting TRAIL, DR5 or DR4; d) a gRNA targeting TRAIL, DR5 or DR4; e) ectopically over-express a DcR1 or DcR2; f) ectopically overexpress a dominant negative mutant of DR5 (e.g., SEQ ID NO: 2370, 2391) or DR4 (e.g., SEQ ID NO: 2275 and 2385); or g) ectopically overexpress a fusion protein containing an extracellular TRAIL-binding domain fused to the transmembrane and cytosolic domain of CD27, CD28, 41BB, OX40, GITR or BCMA (e.g., SEQ ID NO: 2429 to 2440).

[0014] The TRAIL antagonist can be administered to the subject prior to, concurrent with or following the administration of cell and/or immune therapy product, e.g., CAR-T cell or Blinatumomab.

[0015] In some embodiments, the TRAIL antagonist is administered to prevent the of toxicity of cell or immune therapy products. In other embodiments, the TRAIL antagonist is administered pre-emptively at the early signs of toxicity of cell or immune therapy products. In other embodiments, the TRAIL antagonist is administered after the appearance of signs and symptoms toxicity of cell therapy or immune therapy products. In other embodiments, the TRAIL antagonist is administered to treat the signs and symptoms toxicity of cell- or immune-therapy products. In yet other embodiments, in addition to prevention and treatment of toxicity of cell- or immune-therapy products, the TRAIL antagonist is used to improve their efficacy, e.g., to improve the survival, proliferation and expansion of cell therapy products, to prevent exhaustion, and to improve their long-term persistence and anti-tumor activity in vivo.

[0016] The disclosure also relates to methods for prevention and treatment of immune disorders, such as Rheumatoid Arthritis, Systemic-onset juvenile idiopathic arthritis, Still's disease, Macrophage activation syndrome, Hemophagocytic lymphohistiocytosis (HLH), systemic lupus erythematosus (SLE), Kawasaki disease, and inflammatory bowel disease by administration to the subject a TRAIL antagonist, e.g., a TRAIL antagonist described herein, e.g., an agent that interferes with and/or blocks the activity of TRAIL (TNFSF10) or its receptors DR5. In particular, the present disclosure relates to methods for prevention and treatment of immune disorders caused by macrophage activation. In some embodiments, the present disclosure relates to methods for prevention and treatment of immune disorders caused by macrophage activation induced by T cells.

[0017] The disclosure also provides compositions and methods that results in the ectopic and/or over-expression of the wild-type or mutant form of one or more genes from the group of CD27 (TNFRSF7, Gene ID: 939; SEQ ID NO: 2254), CD28 (Gene ID: 940; SEQ ID NO: 2255), 41BB (TNFRSF9, CD137; Gene ID: 3604; SEQ ID NO: 2256), OX40 (TNFRSF4, Gene ID: 7293; SEQ ID NO: 2257), DcR2 (TNFRSF10D, Gene ID: 8793; SEQ ID NO: 2251), DcR1 (TNFRSF10C, Gene ID: 8794; SEQ ID NO: 2250), BCMA (TNFRSF17, Gene ID: 608; SEQ ID NO: 2259), and GITR (TNFRSF18; Gene ID: 8784; SEQ ID NO: 2258) and uses of such compositions and methods for modifying the phenotype, differentiation state and functional activities of immune effector cells (e.g., gene-modified antigen-specific T cells, such as CART cells, TCR modified T cells and SIR-T cells).

[0018] The disclosure provides compositions and methods that disrupt or downregulate the expression or inhibit the activity of one or more genes from the group of BRD9, EZH2, MLL2, MLL3, MLL4, methylcytosine dioxygenase genes (e.g., Tet1, Tet2, Tet3), ATM, CHEK, FBXW10, BCOR, FAT1, ASXL1, PHF6, SF3B1, YY1, CBFb, Runx1, EHMT2 (G9A), SMARCA4, CREBBP, PRDM1/BLIMP1, HDAC2, TRAIL (TNFSF10) and Death Receptor 5 (DR5 or TNFRSF10B) and uses of such compositions and methods for modifying the phenotype, differentiation state, functional activities and toxicities of immune effector cells (e.g., gene-modified antigen-specific T cells, such as CART cells).

[0019] The disclosure also provides compositions and methods that results in the expression of a mutant form of one or more genes from the group BRD9, EZH2, MLL2, MLL3, MLL4, methylcytosine dioxygenase genes (e.g., Tet1, Tet2, Tet3), ATM, CHEK, FBXW10, BCOR, FAT1, ASXL1, PHF6, SF3B1, YY1, CBFb, Runx1, EHMT2 (G9A), SMARCA4, CREBBP, PRDM1/BLIMP1, HDAC2, JAK1, JAK3, STAT5b, STAT3, IL2RG, CARD11, BRAF, TRAIL (TNFSF10), Death Receptor 5 (DR5 or TNFRSF10B), or Death Receptor 4 (DR4 or TNFRSF10A) and uses of such compositions and methods for modifying the phenotype, differentiation state, functional activities and toxicities of immune effector cells (e.g., gene-modified antigen-specific T cells, such as CAR-T cells, TCR modified T cells and SIR-T cells).

[0020] In particular, the disclosure provides methods and compositions for bolstering the therapeutic efficacy of cell therapy products, e.g, chimeric antigen receptor (CAR) T cells and TCR-modified T cells. While not to be bound by the theory, inhibition of activity or disruption of one or both alleles of one or more of BRD9, EZH2, MLL2, MLL3, MLL4, methylcytosine dioxygenase genes (e.g., Tet1, Tet2, Tet3), ATM, CHEK, FBXW10, BCOR, FAT1, ASXL1, PHF6, SF3B1, YY1, CBFb, Runx1, EHMT2 (G9A), SMARCA4, CREBBP, PRDM1/BLIMP1, HDAC2, TRAIL (TNFSF10) and Death Receptor 5 (DR5 or TNFRSF10B) genes leads to change in immune cells (e.g., gene-modified antigen-specific T cells, such as CART cells, TCR modified T cells and SIR-T cells) phenotype, differentiation, proliferation, function and/or toxicity.

[0021] In particular, the disclosure provides methods and compositions for bolstering the therapeutic efficacy of gene-modified antigen-specific T cells (e.g., chimeric antigen receptor (CAR) T cells and TCR-modified T cells and SIR-T cells etc.) by treatment with chemical inhibitors of EZH2, MLL2, MLL3, MLL4, BRD9, methylcytosine dioxygenase genes (e.g., Tet1, Tet2, Tet3), ATM, CHEK, FBXW10, BCOR, FAT1, ASXL1, PHF6, SF3B1, YY1, CBFb, Runx1, EHMT2 (G9A), SMARCA4, CREBBP, PRDM1/BLIMP1, HDAC2, TRAIL and/or DR5 when used alone or in combination.

[0022] Accordingly, the disclosure provides a cell (e.g., a population of cells, such as population of immune effector cells) engineered to express an antigen specific receptor, such as chimeric antigen receptor (CAR), TCR receptor fusion protein (TFPs), a synthetic immune receptor (SIR), an Antibody-TCR, a natural TCR or an artificial TCR, wherein the antigen specific receptor comprises an antigen-binding domain, a transmembrane domain, and an optional intracellular signaling domain, and wherein expression and/or function of one or more of BRD9, EZH2, MLL2, MLL3, MLL4, methylcytosine dioxygenase genes (e.g., Tet1, Tet2, Tet3), ATM, CHEK, FBXW10, BCOR, FAT1, ASXL1, PHF6, SF3B1, YY1, CBFb, Runx1, EHMT2 (G9A), SMARCA4, CREBBP, PRDM1/BLIMP1 and HDAC2, JAK1, JAK3, STAT5b, STAT3, IL2RG, CARD11, BRAF, TRAIL and/or DR5 in said cell has been reduced, eliminated or altered.

[0023] In some embodiments, the immune cells are collected from a donor who has been administered a CXCR4 antagonist (e.g., Plerixafor), a cytokine (e.g., G-CSF, GM-CSF or sargramostim, Neulasta or Pegfilgastrim), a beta2 agonist (e.g., epinephrine), a tyrosine kinase inhibitor (e.g., dasatinib), chemotherapy drug(s) (e.g. cyclophosphamide, doxorubicin etc) either singly or in combination, prior to the collection of immune cells.

[0024] In some embodiments, the donor is an autologous donor while in other embodiments, the donor is an allogeneic donor. In one aspect, the cells of the disclosure are human cells. In one aspect, the cells (e.g., engineered immune effector cells, e.g., CART cells) of the disclosure comprise an inhibitor of BRD9, EZH2, MLL2, MLL3, MLL4, methylcytosine dioxygenase genes (e.g., Tet1, Tet2, Tet3), ATM, CHEK, FBXW10, BCOR, FAT1, ASXL1, PHF6, SF3B1, YY1, CBFb, Runx1, EHMT2 (G9A), SMARCA4, CREBBP, PRDM1/BLIMP1, HDAC2, TRAIL and DR5.

[0025] In some embodiments, the cells of the disclosure comprise an immune receptor (e.g., a CAR, SIR, TFP, Ab-TCR or TCR) and an inhibitor of BRD9, EZH2, MLL2, MLL3, MLL4, methylcytosine dioxygenase genes (e.g., Tet1, Tet2, Tet3), ATM, CHEK, FBXW10, BCOR, FAT1, ASXL1, PHF6, SF3B1, YY1, CBFb, Runx1, EHMT2 (G9A), SMARCA4, CREBBP, PRDM1/BLIMP1, HDAC2, TRAIL and/or DR5 wherein said inhibitor is (1) a gene editing system targeted to one or more sites within the gene encoding EZH2, MLL2, MLL3, MLL4, BRD9, methylcytosine dioxygenase genes (e.g., Tet1, Tet2, Tet3), ATM, CHEK, FBXW10, BCOR, FAT1, ASXL1, PHF6, SF3B1, YY1, CBFb, Runx1, EHMT2 (G9A), SMARCA4, CREBBP, PRDM1/BLIMP1, HDAC2, TRAIL and/or DR5 or its regulatory elements, e.g., BRD9, or its regulatory elements; (2) a gene editing system targeted to one or more sites within the RNA (e.g., mRNA) encoding EZH2, MLL2, MLL3, MLL4, BRD9, methylcytosine dioxygenase genes (e.g., Tet1, Tet2, Tet3), ATM, CHEK, FBXW10, BCOR, FAT1, ASXL1, PHF6, SF3B1, YY1, CBFb, Runx1, EHMT2 (G9A), SMARCA4, CREBBP, PRDM1/BLIMP1, HDAC2, TRAIL and/or DR5 or its regulatory elements, e.g., BRD9, or its 5′ or 3′ untranslated region or its promoter; 3) nucleic acid encoding one or more components of said gene editing system; or (4) combinations thereof.

[0026] In some embodiments, the cells of the disclosure comprise an immune receptor and an inhibitor of BRD9, EZH2, MLL2, MLL3, MLL4, methylcytosine dioxygenase genes (e.g., Tet1, Tet2, Tet3), ATM, CHEK, FBXW10, BCOR, FAT1, ASXL1, PHF6, SF3B1, YY1, CBFb, Runx1, EHMT2 (G9A), SMARCA4, CREBBP, PRDM1/BLIMP1, HDAC2, TRAIL and/or DR5 wherein said inhibitor is a gene editing system targeted to one or more sites within the gene or the RNA encoding BRD9, EZH2, MLL2, MLL3, MLL4, methylcytosine dioxygenase genes (e.g., Tet1, Tet2, Tet3), ATM, CHEK, FBXW10, BCOR, FAT1, ASXL1, PHF6, SF3B1, YY1, CBFb, Runx1, EHMT2 (G9A), SMARCA4, CREBBP, PRDM1/BLIMP1, HDAC2, TRAIL and/or DR5 or its regulatory elements, e.g., BRD9, or its regulatory elements, and wherein the gene editing system is selected from the group consisting of: a CRISPR/Cas9 system, a zinc finger nuclease system, a TALEN system and a meganuclease system.

[0027] In some embodiments, the cells of the disclosure comprise a immune receptor (e.g., a CAR, SIR, TFP, Ab-TCR or TCR), and an inhibitor of BRD9, EZH2, MLL2, MLL3, MLL4, methylcytosine dioxygenase genes (e.g., Tet1, Tet2, Tet3), ATM, CHEK, FBXW10, BCOR, FAT1, ASXL1, PHF6, SF3B1, YY1, CBFb, Runx1, EHMT2 (G9A), SMARCA4, CREBBP, PRDM1/BLIMP1, HDAC2, TRAIL, and/or DR5, wherein said inhibitor is a gene editing system targeted to one or more sites within the gene/RNA encoding BRD9, EZH2, MLL2, MLL3, MLL4, methylcytosine dioxygenase genes (e.g., Tet1, Tet2, Tet3), ATM, CHEK, FBXW10, BCOR, FAT1, ASXL1, PHF6, SF3B1, YY1, CBFb, Runx1, EHMT2 (G9A), SMARCA4, CREBBP, PRDM1/BLIMP1, HDAC2, TRAIL, and/or DR5, or its regulatory elements, e.g., BRD9, or its regulatory elements, and wherein the gene editing system is a CRISPR/Cas system comprising a gRNA molecule comprising a targeting sequence which hybridize to a target sequence of BRD9, EZH2, MLL2, MLL3, MLL4, methylcytosine dioxygenase genes (e.g., Tet1, Tet2, Tet3), ATM, CHEK, FBXW10, BCOR, FAT1, ASXL1, PHF6, SF3B1, YY1, CBFb, Runx1, EHMT2 (G9A), SMARCA4, CREBBP, PRDM1/BLIMP1, HDAC2, TRAIL, and/or DR5. In some embodiments, the targeting sequence is a targeting sequence listed in Tables 4a and 4b. In some embodiments, the gRNA molecule has a sequence listed in Table 8.

[0028] In some embodiments, the cells of the disclosure comprise an immune receptor (e.g., a CAR, SIR, TFP, Ab-TCR or TCR), and an inhibitor of BRD9, EZH2, MLL2, MLL3, MLL4, methylcytosine dioxygenase genes (e.g., Tet1, Tet2, Tet3), ATM, CHEK, FBXW10, BCOR, FAT1, ASXL1, PHF6, SF3B1, YY1, CBFb, Runx1, EHMT2 (G9A), SMARCA4, CREBBP, PRDM1/BLIMP1, HDAC2, TRAIL, and/or DR5, wherein said inhibitor is an siRNA or shRNA specific for BRD9, EZH2, MLL2, MLL3, MLL4, methylcytosine dioxygenase genes (e.g., Tet1, Tet2, Tet3), ATM, CHEK, FBXW10, BCOR, FAT1, ASXL1, PHF6, SF3B1, YY1, CBFb, Runx1, EHMT2 (G9A), SMARCA4, CREBBP, PRDM1/BLIMP1, HDAC2, TRAIL, and/or DR5, or nucleic acid encoding said siRNA or shRNA. In some embodiments, the siRNA or shRNA comprises a sequence complementary to a sequence of BRD9, EZH2, MLL2, MLL3, MLL4, methylcytosine dioxygenase genes (e.g., Tet1, Tet2, Tet3), ATM, CHEK, FBXW10, BCOR, FAT1, ASXL1, PHF6, SF3B1, YY1, CBFb, Runx1, EHMT2 (G9A), SMARCA4, CREBBP, PRDM1/BLIMP1, HDAC2, TRAIL, and/or DR5, mRNA, e.g., comprises a target sequence of shRNA listed in Table 5.

[0029] In some embodiments, the cells of the disclosure comprise an immune receptor (e.g., a CAR, SIR, TFP, Ab-TCR or TCR), and an inhibitor of BRD9, EZH2, MLL2, MLL3, MLL4, methylcytosine dioxygenase genes (e.g., Tet1, Tet2, Tet3), ATM, CHEK, FBXW10, BCOR, FAT1, ASXL1, PHF6, SF3B1, YY1, CBFb, Runx1, EHMT2 (G9A), SMARCA4, CREBBP, PRDM1/BLIMP1, HDAC2, TRAIL, and/or DR5, wherein said inhibitor is a small molecule. In some embodiments, the small molecule is a molecule listed in Table 6.

[0030] In some embodiments, the cells of the disclosure comprise an immune receptor (e.g., a CAR, SIR, TFP, Ab-TCR or TCR), and an inhibitor of BRD9, EZH2, MLL2, MLL3, MLL4, methylcytosine dioxygenase genes (e.g., Tet1, Tet2, Tet3), ATM, CHEK, FBXW10, BCOR, FAT1, ASXL1, PHF6, SF3B1, YY1, CBFb, Runx1, EHMT2 (G9A), SMARCA4, CREBBP, PRDM1/BLIMP1, HDAC2, TRAIL, and/or DR5, wherein the inhibitor is a protein, e.g., is a dominant negative binding partner of BRD9, EZH2, MLL2, MLL3, MLL4, methylcytosine dioxygenase genes (e.g., Tet1, Tet2, Tet3), ATM, CHEK, FBXW10, BCOR, FAT1, ASXL1, PHF6, SF3B1, YY1, CBFb, Runx1, EHMT2 (G9A), SMARCA4, CREBBP, PRDM1/BLIMP1, HDAC2, TRAIL, and/or DR5, or nucleic acid encoding said dominant negative binding partner of BRD9, EZH2, MLL2, MLL3, MLL4, methylcytosine dioxygenase genes (e.g., Tet1, Tet2, Tet3), ATM, CHEK, FBXW10, BCOR, FAT1, ASXL1, PHF6, SF3B1, YY1, CBFb, Runx1, EHMT2 (G9A), SMARCA4, CREBBP, PRDM1/BLIMP1, HDAC2, TRAIL, and/or DR5.

[0031] In some embodiments, the cells of the disclosure comprise an immune receptor (e.g., a CAR, SIR, TFP, Ab-TCR or TCR), and an inhibitor of BRD9, EZH2, MLL2, MLL3, MLL4, methylcytosine dioxygenase genes (e.g., Tet1, Tet2, Tet3), ATM, CHEK, FBXW10, BCOR, FAT1, ASXL1, PHF6, SF3B1, YY1, CBFb, Runx1, EHMT2 (G9A), SMARCA4, CREBBP, PRDM1/BLIMP1, HDAC2, TRAIL, and/or DR5, wherein the inhibitor is a protein, e.g., is a dominant negative (e.g., catalytically inactive) BRD9, EZH2, MLL2, MLL3, MLL4, methylcytosine dioxygenase genes (e.g., Tet1, Tet2, Tet3), ATM, CHEK, FBXW10, BCOR, FAT1, ASXL1, PHF6, SF3B1, YY1, CBFb, Runx1, EHMT2 (G9A), SMARCA4, CREBBP, PRDM1/BLIMP1, HDAC2, TRAIL, and/or DR5, or nucleic acid encoding said dominant negative BRD9, EZH2, MLL2, MLL3, MLL4, methylcytosine dioxygenase genes (e.g., Tet1, Tet2, Tet3), ATM, CHEK, FBXW10, BCOR, FAT1, ASXL1, PHF6, SF3B1, YY1, CBFb, Runx1, EHMT2 (G9A), SMARCA4, CREBBP, PRDM1/BLIMP1, HDAC2, TRAIL, and/or DR5. Exemplary dominant negative mutants of DR5 are provided in SEQ ID NO: 2260 and 2318 to 2330.

[0032] In one aspect, the disclosure provides a method of altering the phenotype, differentiation state and/or the therapeutic efficacy of an immune cell, e.g., an immune receptor-expressing cell, e.g., a cell of any of the previous claims, e.g., a CAR19-expressing cell, comprising a step of decreasing the level or activity of BRD9, EZH2, MLL2, MLL3, MLL4, methylcytosine dioxygenase genes (e.g., Tet1, Tet2, Tet3), ATM, CHEK, FBXW10, BCOR, FAT1, ASXL1, PHF6, SF3B1, YY1, CBFb, Runx1, EHMT2 (G9A), SMARCA4, CREBBP, PRDM1/BLIMP1, HDAC2, TRAIL, and/or DR5, in said cell. In some embodiments, said step comprises contacting said cells with an inhibitor of BRD9, EZH2, MLL2, MLL3, MLL4, methylcytosine dioxygenase genes (e.g., Tet1, Tet2, Tet3), ATM, CHEK, FBXW10, BCOR, FAT1, ASXL1, PHF6, SF3B1, YY1, CBFb, Runx1, EHMT2 (G9A), SMARCA4, CREBBP, PRDM1/BLIMP1, HDAC2, TRAIL, and/or DR5. In some embodiments, a BRD9, EZH2, MLL2, MLL3, MLL4, methylcytosine dioxygenase genes (e.g., Tet1, Tet2, Tet3), ATM, CHEK, FBXW10, BCOR, FAT1, ASXL1, PHF6, SF3B1, YY1, CBFb, Runx1, EHMT2 (G9A), SMARCA4, CREBBP, PRDM1/BLIMP1, HDAC2, TRAIL, and/or DR5, inhibitor of the disclosure is selected from the group consisting of: (1) a gene editing system targeted to one or more sites within the gene/RNA encoding BRD9, EZH2, MLL2, MLL3, MLL4, methylcytosine dioxygenase genes (e.g., Tet1, Tet2, Tet3), ATM, CHEK, FBXW10, BCOR, FAT1, ASXL1, PHF6, SF3B1, YY1, CBFb, Runx1, EHMT2 (G9A), SMARCA4, CREBBP, PRDM1/BLIMP1, HDAC2, TRAIL, and/or DR5, or its corresponding regulatory elements; (2) a nucleic acid (e.g., an siRNA or shRNA) that inhibits expression of BRD9, EZH2, MLL2, MLL3, MLL4, methylcytosine dioxygenase genes (e.g., Tet1, Tet2, Tet3), ATM, CHEK, FBXW10, BCOR, FAT1, ASXL1, PHF6, SF3B1, YY1, CBFb, Runx1, EHMT2 (G9A), SMARCA4, CREBBP, PRDM1/BLIMP1, HDAC2, TRAIL, and/or DR5; (3) a protein (e.g., a dominant negative, e.g., catalytically inactive) BRD9, EZH2, MLL2, MLL3, MLL4, methylcytosine dioxygenase genes (e.g., Tet1, Tet2, Tet3), ATM, CHEK, FBXW10, BCOR, FAT1, ASXL1, PHF6, SF3B1, YY1, CBFb, Runx1, EHMT2 (G9A), SMARCA4, CREBBP, PRDM1/BLIMP1, HDAC2, TRAIL, and/or DR5, or a binding partner of BRD9, EZH2, MLL2, MLL3, MLL4, methylcytosine dioxygenase genes (e.g., Tet1, Tet2, Tet3), ATM, CHEK, FBXW10, BCOR, FAT1, ASXL1, PHF6, SF3B1, YY1, CBFb, Runx1, EHMT2 (G9A), SMARCA4, CREBBP, PRDM1/BLIMP1, HDAC2, TRAIL, and/or DR5; (4) a small molecule that inhibits expression and/or function of BRD9, EZH2, MLL2, MLL3, MLL4, methylcytosine dioxygenase genes (e.g., Tet1, Tet2, Tet3), ATM, CHEK, FBXW10, BCOR, FAT1, ASXL1, PHF6, SF3B1, YY1, CBFb, Runx1, EHMT2 (G9A), SMARCA4, CREBBP, PRDM1/BLIMP1, HDAC2, TRAIL, and/or DR5; (5) a nucleic acid encoding any of (1)-(3); and (6) any combination of (1)-(5).

[0033] In one aspect, the disclosure provides a method of altering the phenotype, differentiation state and/or the therapeutic efficacy of an immune cell, e.g., immune receptor-expressing cell, e.g., a cell of any of the previous claims, e.g., a CAR19-expressing cell, comprising a step of decreasing the level or activity of BRD9, EZH2, MLL2, MLL3, MLL4, methylcytosine dioxygenase genes (e.g., Tet1, Tet2, Tet3), ATM, CHEK, FBXW10, BCOR, FAT1, ASXL1, PHF6, SF3B1, YY1, CBFb, Runx1, EHMT2 (G9A), SMARCA4, CREBBP, PRDM1/BLIMP1, HDAC2, TRAIL, and/or DR5 in said cell. In some embodiments, said step comprises contacting said cells with an inhibitor of BRD9, EZH2, MLL2, MLL3, MLL4, methylcytosine dioxygenase genes (e.g., Tet1, Tet2, Tet3), ATM, CHEK, FBXW10, BCOR, FAT1, ASXL1, PHF6, SF3B1, YY1, CBFb, Runx1, EHMT2 (G9A), SMARCA4, CREBBP, PRDM1/BLIMP1, HDAC2, TRAIL, and/or DR5. In some embodiments, said contacting occurs ex vivo. In some embodiments, said contacting occurs in vivo. In some embodiments, said contacting occurs in vivo prior to delivery of nucleic acid encoding an immune receptor into the cell. In some embodiments, said contacting occurs in vivo after the cells have been administered to a subject in need thereof.

[0034] In one aspect, the disclosure provides a method of increasing the diversity of immune cells, e.g., immune receptor-expressing cells, e.g., cells of any of the previous claims, e.g., CAR19-expressing cells, comprising a step of decreasing the level or activity of BRD9, EZH2, MLL2, MLL3, MLL4, methylcytosine dioxygenase genes (e.g., Tet1, Tet2, Tet3), ATM, CHEK, FBXW10, BCOR, FAT1, ASXL1, PHF6, SF3B1, YY1, CBFb, Runx1, EHMT2 (G9A), SMARCA4, CREBBP, PRDM1/BLIMP1, HDAC2, TRAIL, and/or DR5, in said cells. In some embodiments, said step comprises contacting said cells with an inhibitor of BRD9, EZH2, MLL2, MLL3, MLL4, methylcytosine dioxygenase genes (e.g., Tet1, Tet2, Tet3), ATM, CHEK, FBXW10, BCOR, FAT1, ASXL1, PHF6, SF3B1, YY1, CBFb, Runx1, EHMT2 (G9A), SMARCA4, CREBBP, PRDM1/BLIMP1, HDAC2, TRAIL, and/or DR5. In some embodiments, said contacting occurs ex vivo. In some embodiments, said contacting occurs in vivo. In some embodiments, said contacting occurs in vivo prior to delivery of nucleic acid encoding an immune receptor into the cell. In some embodiments, said contacting occurs in vivo after the cells have been administered to a subject in need thereof.

[0035] In one aspects, the disclosure provides a method of treating a subject in need thereof, comprising administering to said subject an effective amount of the cells as described herein, e.g., an immune effector cell (e.g., T cell or NK cell) comprising an immune receptor, and, optionally, administering to said subject an inhibitor of BRD9, EZH2, MLL2, MLL3, MLL4, methylcytosine dioxygenase genes (e.g., Tet1, Tet2, Tet3), ATM, CHEK, FBXW10, BCOR, FAT1, ASXL1, PHF6, SF3B1, YY1, CBFb, Runx1, EHMT2 (G9A), SMARCA4, CREBBP, PRDM1/BLIMP1, HDAC2, TRAIL, and/or DR5. In some embodiments, the subject receives a pre-treatment with an inhibitor of BRD9, EZH2, MLL2, MLL3, MLL4, methylcytosine dioxygenase genes (e.g., Tet1, Tet2, Tet3), ATM, CHEK, FBXW10, BCOR, FAT1, ASXL1, PHF6, SF3B1, YY1, CBFb, Runx1, EHMT2 (G9A), SMARCA4, CREBBP, PRDM1/BLIMP1, HDAC2, TRAIL, and/or DR5 prior to the initiation of immune- or cell-therapy. In some embodiments, the subject receives concurrent treatment with an inhibitor of BRD9, EZH2, MLL2, MLL3, MLL4, methylcytosine dioxygenase genes (e.g., Tet1, Tet2, Tet3), ATM, CHEK, FBXW10, BCOR, FAT1, ASXL1, PHF6, SF3B1, YY1, CBFb, Runx1, EHMT2 (G9A), SMARCA4, CREBBP, PRDM1/BLIMP1, HDAC2, TRAIL, and/or DR5 and the immune- and/or cell-therapy. In some embodiments, the subject receives treatment with an inhibitor of BRD9, EZH2, MLL2, MLL3, MLL4, methylcytosine dioxygenase genes (e.g., Tet1, Tet2, Tet3), ATM, CHEK, FBXW10, BCOR, FAT1, ASXL1, PHF6, SF3B1, YY1, CBFb, Runx1, EHMT2 (G9A), SMARCA4, CREBBP, PRDM1/BLIMP1, HDAC2, TRAIL, and/or DR5 following the administration of immune- and/or cell-therapy.

[0036] In some embodiments, the subject has a disease associated with expression of a tumor antigen, e.g., a proliferative disease, a precancerous condition, a cancer, and a non-cancer related indication associated with expression of the tumor antigen.

[0037] The disclosure provides uses of the compositions and/or methods described here for treatment of cancer.

[0038] The disclosure provides inhibitors of BRD9, EZH2, MLL2, MLL3, MLL4, methylcytosine dioxygenase genes (e.g., Tet1, Tet2, Tet3), ATM, CHEK, FBXW10, BCOR, FAT1, ASXL1, PHF6, SF3B1, YY1, CBFb, Runx1, EHMT2 (G9A), SMARCA4, CREBBP, PRDM1/BLIMP1, HDAC2, TRAIL, and/or DR5 and mutants of JAK1, JAK3, STAT5b, STAT3, IL2RG, CARD11, and/or BRAF, and a wild-type and mutant of CD28 (Gene ID: 940), 41BB (TNFRSF9, CD137; Gene ID: 3604), OX40 (TNFRSF4, Gene ID: 7293), DcR2 (TNFRSF10D, Gene ID: 8793), DcR1 (TNFRSF10C, Gene ID: 8794), BCMA (TNFRSF17, Gene ID: 608), and GITR (TNFRSF18; Gene ID: 8784) for use in the treatment of a subject, wherein said subject has received, is receiving, or is about to receive immune- and/or cell-therapy.

[0039] The disclosure further provides a method of manufacturing immune cells, e.g., immune effector cells, comprising introducing nucleic acid encoding an immune receptor into immune effector cells such that said nucleic acid (or immune receptor-encoding portion thereof) integrates into the genome of the cells within a BRD9, EZH2, MLL2, MLL3, MLL4, methylcytosine dioxygenase genes (e.g., Tet1, Tet2, Tet3), ATM, CHEK, FBXW10, BCOR, FAT1, ASXL1, PHF6, SF3B1, YY1, CBFb, Runx1, EHMT2 (G9A), SMARCA4, CREBBP, PRDM1/BLIMP1, HDAC2, TRAIL, and/or DR5 gene (e.g., within an intron or exon of a BRD9, EZH2, MLL2, MLL3, MLL4, methylcytosine dioxygenase genes (e.g., Tet1, Tet2, Tet3), ATM, CHEK, FBXW10, BCOR, FAT1, ASXL1, PHF6, SF3B1, YY1, CBFb, Runx1, EHMT2 (G9A), SMARCA4, CREBBP, PRDM1/BLIMP1, HDAC2, TRAIL, and/or DR5 gene), such that BRD9, EZH2, MLL2, MLL3, MLL4, methylcytosine dioxygenase genes (e.g., Tet1, Tet2, Tet3), ATM, CHEK, FBXW10, BCOR, FAT1, ASXL1, PHF6, SF3B1, YY1, CBFb, Runx1, EHMT2 (G9A), SMARCA4, CREBBP, PRDM1/BLIMP1, HDAC2, TRAIL, and/or DR5, expression and/or function is reduced or eliminated.

[0040] The disclosure further provides a method of manufacturing immune cells, e.g., immune effector-cells for adoptive cellular therapy, comprising contacting said immune cells ex vivo with a BRD9, EZH2, MLL2, MLL3, MLL4, methylcytosine dioxygenase genes (e.g., Tet1, Tet2, Tet3), ATM, CHEK, FBXW10, BCOR, FAT1, ASXL1, PHF6, SF3B1, YY1, CBFb, Runx1, EHMT2 (G9A), SMARCA4, CREBBP, PRDM1/BLIMP1, HDAC2, TRAIL, and/or DR5, inhibitor either singly or in combination. In some embodiments, the inhibitor is a BRD9 inhibitor. In some embodiments, the inhibitor is a TRAIL inhibitor.

[0041] The disclosure further provides a method of manufacturing immune cells, e.g., immune effector cells, e.g., for adoptive cellular therapy, comprising administrating to the donor from whom the immune cells are harvested a CXCR antagonist, such as Mozibil (Plerixafor), a cytokine (e.g., G-CSF or GM-CSF), a beta2 agonist (e.g., epinephrine), a tyrosine kinase inhibitor (e.g, a Src kinase inhibitor, e.g., Dasatinib), chemotherapy drugs (e.g., cyclophosphamide, doxorubicin etc.) either alone or in combination prior to the collection (i.e. leukophersis) of immune cells for manufacturing. The disclosure further provides a method of manufacturing immune cells for adoptive cellular therapy, comprising subjecting the donor from whom the immune cells are harvested to exercise so as to increase the heart rate to about 30% (e.g., 40%, 50%, 60%, 80%, 100%, 125%, 150%) higher than the donor's heart rate at rest.

[0042] The disclosure further provides a vector comprising sequence encoding an immune receptor and sequence encoding an inhibitor of BRD9, EZH2, MLL2, MLL3, MLL4, methylcytosine dioxygenase genes (e.g., Tet1, Tet2, Tet3), ATM, CHEK, FBXW10, BCOR, FAT1, ASXL1, PHF6, SF3B1, YY1, CBFb, Runx1, EHMT2 (G9A), SMARCA4, CREBBP, PRDM1/BLIMP1, HDAC2, TRAIL, and/or DR5. In some embodiments, the inhibitor of BRD9, EZH2, MLL2, MLL3, MLL4, methylcytosine dioxygenase genes (e.g., Tet1, Tet2, Tet3), ATM, CHEK, FBXW10, BCOR, FAT1, ASXL1, PHF6, SF3B1, YY1, CBFb, Runx1, EHMT2 (G9A), SMARCA4, CREBBP, PRDM1/BLIMP1, HDAC2, TRAIL, and/or DR5 is a (1) a gene editing system targeted to one or more sites within the gene/RNA encoding BRD9, EZH2, MLL2, MLL3, MLL4, methylcytosine dioxygenase genes (e.g., Tet1, Tet2, Tet3), ATM, CHEK, FBXW10, BCOR, FAT1, ASXL1, PHF6, SF3B1, YY1, CBFb, Runx1, EHMT2 (G9A), SMARCA4, CREBBP, PRDM1/BLIMP1, HDAC2, TRAIL, and/or DR5, or its corresponding regulatory elements; (2) a nucleic acid (e.g., an siRNA or shRNA) that inhibits expression of BRD9, EZH2, MLL2, MLL3, MLL4, methylcytosine dioxygenase genes (e.g., Tet1, Tet2, Tet3), ATM, CHEK, FBXW10, BCOR, FAT1, ASXL1, PHF6, SF3B1, YY1, CBFb, Runx1, EHMT2 (G9A), SMARCA4, CREBBP, PRDM1/BLIMP1, HDAC2, TRAIL, and/or DR5; (3) a protein (e.g., a dominant negative, e.g., catalytically inactive) BRD9, EZH2, MLL2, MLL3, MLL4, methylcytosine dioxygenase genes (e.g., Tet1, Tet2, Tet3), ATM, CHEK, FBXW10, BCOR, FAT1, ASXL1, PHF6, SF3B1, YY1, CBFb, Runx1, EHMT2 (G9A), SMARCA4, CREBBP, PRDM1/BLIMP1, HDAC2, TRAIL, and/or DR5, or a binding partner of BRD9, EZH2, MLL2, MLL3, MLL4, methylcytosine dioxygenase genes (e.g., Tet1, Tet2, Tet3), ATM, CHEK, FBXW10, BCOR, FAT1, ASXL1, PHF6, SF3B1, YY1, CBFb, Runx1, EHMT2 (G9A), SMARCA4, CREBBP, PRDM1/BLIMP1, HDAC2, TRAIL, and/or DR5; and (4) a nucleic acid encoding any of (1)-(3), or combinations thereof. In some embodiments, the sequence encoding an immune receptor and the sequence encoding an inhibitor of BRD9, EZH2, MLL2, MLL3, MLL4, methylcytosine dioxygenase genes (e.g., Tet1, Tet2, Tet3), ATM, CHEK, FBXW10, BCOR, FAT1, ASXL1, PHF6, SF3B1, YY1, CBFb, Runx1, EHMT2 (G9A), SMARCA4, CREBBP, PRDM1/BLIMP1, HDAC2, TRAIL, and/or DR5 are separated by a 2A site.

[0043] The disclosure further provides a gene editing system that is specific for a sequence of the BRD9, EZH2, MLL2, MLL3, MLL4, methylcytosine dioxygenase genes (e.g., Tet1, Tet2, Tet3), ATM, CHEK, FBXW10, BCOR, FAT1, ASXL1, PHF6, SF3B1, YY1, CBFb, Runx1, EHMT2 (G9A), SMARCA4, CREBBP, PRDM1/BLIMP1, HDAC2, TRAIL, and/or DR5 gene or its regulatory elements, e.g., a BRD9, BCOR, PRDM1, TRAIL gene or its regulatory elements. In some embodiments, the gene editing system is specific for a sequence of a BRD9 gene or its RNA. In some embodiments, the gene editing system is (1) a CRISPR/Cas gene editing system, (2) a zinc finger nuclease system, a TALEN system and a meganuclease system. In some embodiments, the gene editing system is a CRISPR/Cas gene editing system. In some embodiments, the gene editing system comprises: a gRNA molecule comprising a targeting sequence specific to BRD9, EZH2, MLL2, MLL3, MLL4, methylcytosine dioxygenase genes (e.g., Tet1, Tet2, Tet3), ATM, CHEK, FBXW10, BCOR, FAT1, ASXL1, PHF6, SF3B1, YY1, CBFb, Runx1, EHMT2 (G9A), SMARCA4, CREBBP, PRDM1/BLIMP1, HDAC2, TRAIL, and/or DR5 gene or its regulatory elements, and a Cas9 protein; a gRNA molecule comprising a targeting sequence specific to BRD9, EZH2, MLL2, MLL3, MLL4, methylcytosine dioxygenase genes (e.g., Tet1, Tet2, Tet3), ATM, CHEK, FBXW10, BCOR, FAT1, ASXL1, PHF6, SF3B1, YY1, CBFb, Runx1, EHMT2 (G9A), SMARCA4, CREBBP, PRDM1/BLIMP1, HDAC2, TRAIL, and/or DR5 gene or its regulatory elements, and a nucleic acid encoding a Cas9 protein; a nucleic acid encoding a gRNA molecule comprising a targeting sequence specific to BRD9, EZH2, MLL2, MLL3, MLL4, methylcytosine dioxygenase genes (e.g., Tet1, Tet2, Tet3), ATM, CHEK, FBXW10, BCOR, FAT1, ASXL1, PHF6, SF3B1, YY1, CBFb, Runx1, EHMT2 (G9A), SMARCA4, CREBBP, PRDM1/BLIMP1, HDAC2, TRAIL, and/or DR5 gene or its regulatory elements, and a Cas9 protein; or a nucleic acid encoding a gRNA molecule comprising a targeting sequence specific to BRD9, EZH2, MLL2, MLL3, MLL4, methylcytosine dioxygenase genes (e.g., Tet1, Tet2, Tet3), ATM, CHEK, FBXW10, BCOR, FAT1, ASXL1, PHF6, SF3B1, YY1, CBFb, Runx1, EHMT2 (G9A), SMARCA4, CREBBP, PRDM1/BLIMP1, HDAC2, TRAIL, and/or DR5 gene or its regulatory elements, and a nucleic acid encoding a Cas9 protein. In some embodiments, the gene editing system further comprises a template DNA. In some embodiments, the template DNA comprises nucleic acid sequence encoding an immune receptor, e.g., an immune receptor as described herein.

[0044] In some embodiments, the present disclosure also provides a method of treatment or prevention of disease in a subject with an immune cell therapy comprising the steps of i) checking the expression of the ligands of costimulatory receptors in the disease-causing or disease-associated cells, e.g., cancer cells or stromal cells; ii) identifying the ligands of the costimulatory receptors that are expressed in the disease-causing or disease-associated cells, e.g., cancer cells or stromal cells; iii) enhancing the expression in the immune cells of one or more of the costimulatory receptors whose ligands are expressed in the disease-causing or disease-associated cells; iv) administering to the subject the immune cells from step (iii) to prevent or treat a disease. In some embodiments, the expression of the ligands in the disease-causing or disease-associated cells or tissues is examined at the mRNA level. Methods to examine the expression of a gene at the mRNA are known in the art and include, but are not limited, to RT-PCR, northern blot, RNA-Seq, and gene expression microarrays etc. In some embodiments, the expression of the ligands in the disease-causing or disease-associated cells or tissues is examined at the protein level. Methods to examine the expression of a protein are known in the art and include, but are not limited, to immunohistochemistry, flow cytometry, tissue micro-arrays, immunoblotting and mass spectroscopy etc. In some embodiments, the ligand consists of one or more of, but is not limited to, TRAIL, CD70, CD80, CD86, 41BBL, OX40L, GITRL and TNFSF13B/TALL-1/BAFF. In some embodiments, the costimulatory receptor consists of or comprises of one or more of, but is not limited to, a receptor containing the extracellular ligand binding domain of DcR1, DcR2, DR4, DR5, CD27, CD28, 41BB, OX40, GITR and BCMA. In some embodiments, the costimulatory receptor consists of or comprises of one or more of, but is not limited to DcR1, DcR2, CD27, CD28, 41BB, OX40, GITR and BCMA. In some embodiments, the costimulatory receptor consists of or comprises of one or more of, but is not limited to, a receptor containing the extracellular ligand binding domain of DcR1, DcR2, DR4, DR5, CD27, CD28, 41BB, OX40, GITR and BCMA fused via a transmembrane domain to the cytosolic domain of a costimulatory receptor, e.g., CD27, CD28, 41BB, OX40, GITR and BCMA. Table 1 provides the SEQ ID NO of several exemplary fusion proteins containing the extracellular domain of DR5, DR4, DcR1 and DcR2 fused to the cytosolic domain of CD27, CD28, 41BB, OX40, GITR and BCMA. In some embodiments, the immune cell is a T cell, e.g., a CAR-T cell or a TCR-T cell or a TIL. In an exemplary embodiment, the CAR-T cells express a CAR targeting CD19 and coexpress CD27, where the disease-causing and/or disease-associated cells express CD19 and CD70. In another exemplary embodiment, the CAR-T cells express a CAR targeting Mesothelin and coexpress DcR1, where the disease-causing and/or disease-associated cells express Mesothelin and TRAIL. In another exemplary embodiment, the CAR-T cells express a CAR targeting Her2 and coexpress 41BB, where the disease-causing and/or disease-associated cells express Her2 and 41BBL. In another exemplary embodiment, the T cells express a TCR targeting NYESO-1/HLA-A2 complex and coexpress OX40, where the disease-causing and/or disease-associated cells express NYESO-1/HLA-A2 and OX40L. In an exemplary embodiment, the NK-T cells express a CAR targeting CD19 and coexpress CD27, where the disease-causing and/or disease-associated cells express CD19 and CD70.

[0045] The disclosure further provides a composition for the ex vivo manufacture of immune cells, e.g., immune effector cells, such as an immune receptor expressing cells (e.g., CAR-T, SIR-T, TCR-T cells etc) comprising a BRD9, EZH2, MLL2, MLL3, MLL4, methylcytosine dioxygenase genes (e.g., Tet1, Tet2, Tet3), ATM, CHEK, FBXW10, BCOR, FAT1, ASXL1, PHF6, SF3B1, YY1, CBFb, Runx1, EHMT2 (G9A), SMARCA4, CREBBP, PRDM1/BLIMP1, HDAC2, TRAIL and/or DR5 inhibitor, e.g., a BRD9, CBFb, and/or YY1 inhibitor. The inhibitors can be used singly or in combination.

[0046] The disclosure further provides a composition for the ex vivo manufacture of a diverse pool of immune effector cells, such as an immune receptor expressing cells (e.g., CAR-T, SIR-T, TCR-T cells etc) comprising a BRD9, EZH2, MLL2, MLL3, MLL4, methylcytosine dioxygenase genes (e.g., Tet1, Tet2, Tet3), ATM, CHEK, FBXW10, BCOR, FAT1, ASXL1, PHF6, SF3B1, YY1, CBFb, Runx1, EHMT2 (G9A), SMARCA4, CREBBP, PRDM1/BLIMP1, HDAC2, TRAIL and/or DR5 inhibitor, e.g., a BRD9, CBFb, and/or YY1 inhibitor. The inhibitors can be used singly or in combination.

[0047] Table 6 presents the targets, names and Cas number of various exemplary chemical inhibitors targeting different genes that can be used in the methods of the disclosure.

[0048] The disclosure further provides a population of cells comprising one or more cells described herein, wherein the population of cells comprises a higher percentage of stem like T cells or Tscm cells (e.g., CD45RA+CD62L+CCR7+CD27+CD95+ T cells) than a population of cells which does not comprise one or more cells in which expression and/or function of BRD9, EZH2, MLL2, MLL3, MLL4, methylcytosine dioxygenase genes (e.g., Tet1, Tet2, Tet3), ATM, CHEK, FBXW10, BCOR, FAT1, ASXL1, PHF6, SF3B1, YY1, CBFb, Runx1, EHMT2 (G9A), SMARCA4, CREBBP, PRDM1/BLIMP1, HDAC2, TRAIL and/or DR5 in said cell has been reduced or eliminated.

[0049] The present disclosure also pertains, at least in part, to methods for improving the expansion and/or activation (e.g., in vitro and in vivo expansion and/or activation) of immune cells, e.g., immune effector T cells, e.g., CAR-T cells or TCR-T cells or TILs, for the purpose of adoptive cellular therapy. Some embodiments described herein provide for expansion and/or activation of immune cells by exposing them to a bispecific or multi-specific engager that contains at least one antigen binding domain, e.g., first antigen binding domain, capable of engaging the immune cells and at least one antigen binding domain, e.g., a second antigen binding domain, capable of engaging an antigen presenting cell (APC) or antigen presenting substrate (APS), e.g. antigen-conjugated beads. In some embodiment, the APC is a hematopoietic cell. In some embodiments, the bispecific engager is a bispecific antibody, e.g., Blinatumomab. In some embodiments, the method further involves exposing the immune cells to an agonist, such as an antibody (e.g., Utomilumab) or a ligand (e.g., 41BBL), capable of activating a costimulatory receptor (e.g., CD28, 41BB, CD27 etc.) on immune cells, e.g., T cells or NK cells.

[0050] In some embodiment, the bispecific or multispecific engager comprises at least one binding domain capable of binding to and activating the T cell receptor (TCR) complex of T cells. In some embodiment, the bispecific or multispecific engager comprises at least one binding domain capable of binding to and activating the CD3 subunit of the TCR complex. In some embodiments, the bispecific or multispecific engager comprises at least one binding domain capable of binding to and activating the CD3-epsilon subunit of the TCR complex. In some embodiments, the bispecific or multispecific engager comprises at least one binding domain capable of binding to and activating a receptor on the T cells that provides co-stimulation; i.e., a co-stimulatory receptor. Exemplary co-stimulatory receptor that can be bound by the bispecific engager include CD28, CD137 (4-1BB), CD134 (OX40), Dap10, CD27, CD2, CD5, ICAM-1, LFA-1, TNFR-I, TNFR-II, Fas, CD30 and CD40. In some embodiment, the bispecific or multispecific engager in the presence of APC or APS activates the signaling through the TCR complex. In some embodiment, the bispecific or multispecific engager in the presence of APC or APS activates T cells via signaling through a co-stimulatory receptor.

[0051] In some embodiment, the bispecific or multispecific engager comprises at least one binding domain capable of binding to the hematopoietic cells. In some embodiment, the bispecific or multispecific engager comprises at least one binding domain capable of binding to the lymphoid-lineage hematopoietic cells. In some embodiment, the bispecific or multispecific engager comprises at least one binding domain capable of binding to the B-lymphoid-lineage hematopoietic cells. Exemplary B-lineage lymphoid cells bound by the bispecific or multispecific engager include immature B cells, mature B cells and plasma cells and combination thereof. In some embodiment, the bispecific or multispecific engager comprises at least one binding domain, e.g., second binding domain, capable of binding to an antigen expressed on B-lymphoid-lineage hematopoietic cells. In some embodiments, the at least one binding domain of the bispecific or multispecific engager binds to CD3e (or CD3ε) and at least one binding domain, e.g., the second antigen binding domain, binds to CD19. In some embodiments, the bispecific engager is Blinatumomab. In some embodiments, the at least one binding domain of the bispecific or multispecific engager binds to CD3e (or CD3ε) and at least one binding domain, e.g., the second antigen binding domain, binds to CD22. In some embodiments, the at least one binding domain of the bispecific or multispecific engager binds to CD3e (or CD3ε) and at least one binding domain, e.g., the second antigen binding domain, binds to CD20/MS4A1. In some embodiments, the at least one binding domain of the bispecific or multispecific engager binds to CD3e (or CD3ε) and at least one binding domain, e.g., the second antigen binding domain, binds to CD23. In some embodiments, the at least one binding domain of the bispecific or multispecific engager binds to CD3e (or CD3ε) and at least one binding domain, e.g., the second antigen binding domain, binds to BCMA. In some embodiments, the bispecific engager is BI 836909 (AMG 420). In some embodiments, the at least one binding domain of the bispecific or multispecific engager binds to CD3e (or CD3ε) and at least one binding domain, e.g., the second antigen binding domain, binds to CS1/SLAMF7. In some embodiments, the at least one binding domain of the bispecific or multispecific engager binds to CD3e (or CD3ε) and at least one binding domain, e.g., the second antigen binding domain, binds to CD138. In some embodiments, the at least one binding domain of the bispecific or multispecific engager binds to CD3e (or CD3ε) and at least one binding domain, e.g., the second antigen binding domain, binds to CD123. In some embodiments, the at least one binding domain of the bispecific or multispecific engager binds to CD3e (or CD3ε) and at least one binding domain, e.g., the second antigen binding domain, binds to MPL.

[0052] In some embodiment, the bispecific or multispecific engager comprises at one binding domain capable of binding to an activating receptor (e.g., CD3) and/or costimulatory receptor (e.g., CD28, 41BB etc) on T cells and at least one binding domain capable of binding to the non-hematopoietic cells (e.g, breast cells, lung cells, colon cells, skin cells etc.) or cell lines (e.g., MCF7, H460, SW480 etc.).

[0053] In some embodiment, the bispecific or multispecific engager comprises at least one binding domain capable of binding to and activating a NK cell receptor and at least one binding domain capable of binding to an antigen expressed on APC or APS.

[0054] In some embodiments, the activation and expansion of T cells involves exposing them to a bispecific or multispecific engager (e.g., antibody) that binds to a T cell activating- or costimulatory receptor (e.g., TCR or CD28) in the presence of a cell expressing a cognate ligand (e.g. an antigen) bound by the second antigen binding domain of the bispecific or multispecific engager (e.g., antibody).

[0055] In some embodiments, the activation and expansion of T cells involves exposing them to a bispecific or multispecific engager (e.g., antibody) that binds to a T cell activating- or costimulatory receptor (e.g., TCR or CD28) in the presence of a solid substrate expressing a cognate ligand (e.g. an antigen or anti-idiotype antibody) bound by the second antigen binding domain of bispecific or multispecific engager (e.g., antibody).

[0056] In some embodiments, the method involves activation/expansion of immune cells (e.g., T cells) by exposing them to two different bispecific or multi-specific engagers where the at least one antigen binding domain of the first bispecific or multispecific engager binds to and activates an activating cell receptor (e.g., T cell receptor or CD3 receptor complex) and at least one antigen binding domain of the second bispecific or multispecific engager binds to and activates a costimulatory receptor (e.g., 41BB or CD28) and at least one antigen binding domain of the two bispecific or multispecific engagers binds to at least one antigen (e.g., CD19, CD22, CD20/MS4A1 and/or BCMA, etc.) expressed on APC, e.g., hematopoietic cells (e.g., B cells, plasma cells or lymphoma cell lines etc.) or non-hematopoietic cells (e.g., breast cells, lung cancer cell line etc.) or APS (e.g, CD19-ectodomain coated beads or CD19 anti-ideotype antibody coated beads).

[0057] In some embodiments, the population of immune cells used in the methods described herein is acquired, e.g., obtained, from a blood sample from a subject (e.g., a cancer patient). In one embodiment, the population of immune cells is obtained by apheresis. In one embodiment, the population of immune cells is obtained by apheresis from a subject who has been made to exercise or administered a CXCR antagonist (e.g., Mozibil or Plerixafor), a cytokine (e.g., G-CSF, GM-CSF or sargramostim, Neulasta or Pegfilgastrim), a beta2 adrenergic agonist (e.g., epinephrine), a tyrosine kinase inhibitor (e.g., dasatinib), chemotherapy drug(s) (e.g., cyclophosphamide, doxorubicin) or a combination of the above agents prior to the collection of immune cells.

[0058] In some embodiments, the immune cell population includes immune effector cells, e.g., as described herein. Exemplary immune effector cells include T cells, e.g., alpha/beta T cells and gamma/delta T cells, natural killer T (NKT) cells, or a combination thereof.

[0059] In some embodiments, the immune cell population includes peripheral blood mononucleated cells (PBMCs), or cord blood cells, tissue resident lymphocytes, tumor infilterating lymphocytes, bone marrow resident mono-nuclear cells or a combination thereof.

[0060] In certain embodiments, the immune cell population includes primary T cells or subsets of lymphocytes, including, for example, anergized T cells, naive T cells, T-regulatory cells, Th-17 cells, stem T cells, tissue-resident T cells, tumor infilterating T cells or a combination thereof.

[0061] In certain embodiments, the immune cell population includes T cells that have been engineered to express a natural or a synthetic receptor targeting a specific antigen. An exemplary natural receptor includes a T cell receptor (TCR) targeting NY-ESO1 or WTI. Exemplary synthetic receptors include a CAR or a next generation CARs (e.g., K13-CAR, SIR, zSIR, Ab-TCR, TFP etc.) or a recombinant TCR (rTCR).

[0062] The disclosure further relates to novel nucleic acid constructs and their incorporation into immune cells. Particularly, the disclosure relates to the discovery that immune cells, preferably T cells, e.g., primary human T cells, which are optionally engineered to express at least one immune receptor (e.g., CAR, SIR, AbTCR, TFP, TCR etc) and one or more signaling molecules, e.g., JAK1, JAK3, STAT5b, STAT3, IL2RG, CARD11, and/or BRAF or mutated forms thereof, possess properties which render these cells well suited for use in human or animal therapy. In some embodiments, the nucleic acid construct or constructs encoding the immune receptor and the signaling molecule or variant thereof may be on the same or different vectors. In some embodiments, the signaling molecule or variant thereof is expressed in the immune effector cell that expresses an endogenous immune receptor (e.g., TCR). In some embodiments, the signaling molecule or variant thereof is expressed in the immune effector cell that expresses an exogenous (or engineered) immune receptor (e.g., CAR, SIR, AbTCR, TFP or cTCR etc.). In some embodiments, the signaling molecule or variant thereof is expressed in the immune effector cell transiently. In some embodiments, the signaling molecule or variant thereof is expressed in the immune effector cell stably.

TABLE 1

| | | | | SEQ ID- | SEQ ID- |
|---|---|---|---|---|---|
| NAME | SEQ ID-DNA | SEQ ID-PRT | NAME | DNA | PRT |
| JAK3 | 360 | 1790 | GITR-SP | 2285 | 2395 |
| JAK3-M511I | 361 | 1791 | GITR-SP-ECD | 2286 | 2396 |
| JAK3-A573V | 362 | 1792 | GITR-SP-ECD-TM | 2287 | 2397 |
| JAK3-R657W | 363 | 1793 | GITR-ECD | 2288 | 2398 |
| JAK3-Q507P | 364 | 1794 | GITR-TM | 2289 | 2399 |
| JAK3-G491S | 365 | 1795 | GITR-CP | 2290 | 2400 |
| JAK3-V674A | 366 | 1796 | OX40-SP | 2291 | 2401 |
| JAK3-V678L | 367 | 1797 | OX40-SP-ECD | 2292 | 2402 |
| Stat5b | 368 | 1798 | OX40-SP-ECD-TM | 2293 | 2403 |
| Stat5b-T628S | 369 | 1799 | OX40-ECD | 2294 | 2404 |
| Stat5b-N642H | 370 | 1800 | OX40-TM | 2295 | 2405 |
| Stat5b-Y665F | 371 | 1801 | OX40-CP | 2296 | 2406 |
| Stat5b-Q706L | 372 | 1802 | CD27-SP | 2297 | 2407 |
| Stat5b-R659C | 373 | 1803 | CD27-SP-ECD | 2298 | 2408 |
| JAK1 | 374 | 1804 | CD27-SP-ECD-TM | 2299 | 2409 |
| JAK1-V658F | 375 | 1805 | CD27-ECD | 2300 | 2410 |
| JAK1-S7031 | 376 | 1806 | CD27-TM | 2301 | 2411 |
| CARD11 | 377 | 1807 | CD27-CP | 2302 | 2412 |
| CARD11-S615F | 378 | 1808 | 41BB-SP | 2303 | 2413 |
| CARD11-E626K | 379 | 1809 | 41BB-SP-ECD | 2304 | 2414 |
| STAT3 | 380 | 1810 | 41BB-SP-ECD-TM | 2305 | 2415 |
| STAT3-D661Y | 381 | 1811 | 41BB-ECD | 2306 | 2416 |
| STAT3-Y640F | 382 | 1812 | 41BB-TM | 2307 | 2417 |
| STAT3-A702T | 383 | 1813 | 41BB-CP | 2308 | 2418 |
| STAT3-S614R | 384 | 1814 | CD28-SP | 2309 | 2419 |
| STAT3-G618R | 385 | 1815 | CD28-SP-ECD | 2310 | 2420 |
| IL2RG | 386 | 1816 | CD28-SP-ECD-TM | 2311 | 2421 |
| IL2RG-K315E | 387 | 1817 | CD28-ECD | 2312 | 2422 |
| BRAF | 388 | 1818 | CD28-TM | 2313 | 2423 |
| BRAF-V600E | 389 | 1819 | CD28-CP | 2314 | 2424 |
| DcR1-(TNFRSF10C) | 2250 | 2360 | BCMA-ECD | 2315 | 2425 |
| DcR2-(TNFRSF10D) | 2251 | 2361 | BCMA-TM | 2316 | 2426 |
| CD27 | 2254 | 2364 | BCMA-CP | 2317 | 2427 |
| CD28 | 2255 | 2365 | DcR2-SP | 2267 | 2377 |
| 41BB | 2256 | 2366 | DcR2-SP-ECD | 2268 | 2378 |
| OX40 | 2257 | 2367 | DcR2-SP-ECD-TM | 2269 | 2379 |
| GITR-(TNFRSF18) | 2258 | 2368 | DcR2-ECD | 2270 | 2380 |
| BCMA | 2259 | 2369 | DcR2-TM | 2271 | 2381 |
| DR5-L363N | 2260 | 2370 | DcR2-CP | 2272 | 2382 |
| DcR1-SP | 2262 | 2372 | DR4-SP | 2273 | 2383 |
| DcRl-SP-ECD | 2263 | 2373 | DR4-SP-ECD | 2274 | 2384 |
| DcRl-SP-ECD-TM | 2264 | 2374 | DR4-SP-ECD-TM | 2275 | 2385 |
| DcR1-ECD | 2265 | 2375 | DR4-ECD | 2276 | 2386 |
| DcR1-TM | 2266 | 2376 | DR4-TM | 2277 | 2387 |
| DR4-CP | 2278 | 2388 | FADD-DN | 2353 | 2463 |
| DR5-SP | 2279 | 2389 | Caspase-8-D73A | 2354 | 2464 |
| DR5-SP-ECD | 2280 | 2390 | Caspase-8-D73A- | 2355 | 2465 |
| | | | L74A | | |
| DR5-SP-ECD-TM | 2281 | 2391 | Caspase-8-D73A- | 2356 | 2466 |
| | | | L74A-L75A | | |
| DR5-ECD | 2282 | 2392 | DR5-CP | 2284 | 2394 |
| DR5-TM | 2283 | 2393 | DcRl-SP-ECD- | 2338 | 2448 |
| | | | hIgFc | | |
| DR5-SP-ECD-hIgFc | 2318 | 2428 | DcRl-SP-ECD- | 2339 | 2449 |
| | | | CD27-TM-CP | | |
| DR5-SP-ECD-TM-CD27- | 2319 | 2429 | DcRl-SP-ECD- | 2340 | 2450 |
| CP | | | CD28-TM-CP | | |
| DR5-SP-ECD-TM-CD28- | 2320 | 2430 | DcRl-SP-ECD- | 2341 | 2451 |
| CP | | | 41BB-TM-CP | | |
| DR5-SP-ECD-TM-41BB- | 2321 | 2431 | DcRl-SP-ECD- | 2342 | 2452 |
| CP | | | OX40-TM-CP | | |
| DR5-SP-ECD-TM- | 2322 | 2432 | DcRl-SP-ECD- | 2343 | 2453 |
| OX40-CP | | | GITR-TM-CP | | |
| DR5-SP-ECD-TM-GITR- | 2323 | 2433 | DcRl-SP-ECD- | 2344 | 2454 |
| CP | | | BCMA-TM-CP | | |
| DR5-SP-ECD-TM- | 2324 | 2434 | DcR2-SP-ECD- | 2345 | 2455 |
| BCMA-CP | | | hIgFc | | |
| DR5-SP-ECD-CD27-TM- | 2325 | 2435 | DcR2-SP-ECD- | 2346 | 2456 |
| CP | | | CD27-TM-CP | | |
| DR5-SP-ECD-CD28-TM- | 2326 | 2436 | DcR2-SP-ECD- | 2347 | 2457 |
| CP | | | CD28-TM-CP | | |
| DR5-SP-ECD-41BB-TM- | 2327 | 2437 | DcR2-SP-ECD- | 2348 | 2458 |
| CP | | | 41BB-TM-CP | | |
| DR5-SP-ECD-OX40- | 2328 | 2438 | DcR2-SP-ECD- | 2349 | 2459 |
| TM-CP | | | OX40-TM-CP | | |
| DR5-SP-ECD-GITR-TM- | 2329 | 2439 | DcR2-SP-ECD- | 2350 | 2460 |
| CP | | | GITR-TM-CP | | |
| DR5-SP-ECD-BCMA- | 2330 | 2440 | DcR2-SP-ECD- | 2351 | 2461 |
| TM-CP | | | BCMA-TM-CP | | |
| DR4-SP-ECD-hIgFc | 2331 | 2441 | DR4-SP-ECD- | 2334 | 2444 |
| | | | 41BB-TM-CP | | |
| DR4-SP-ECD-CD27-TM- | 2332 | 2442 | DR4-SP-ECD- | 2335 | 2445 |
| CP | | | OX40-TM-CP | | |
| DR4-SP-ECD-CD28-TM- | 2333 | 2443 | DR4-SP-ECD- | 2336 | 2446 |
| CP | | | GITR-TM-CP | | |
| | | | DR4-SP-ECD- | 2337 | 2447 |
| | | | BCMA-TM-CP | | |

TABLE 2

| | DNA | PRT |
|---|---|---|
| NAME | SEQ ID | SEQ ID |
| BRD9-transcript | 391 | 1821 |
| variant 1 | | |
| BRD9-variant 2 | 392 | 1822 |
| BRD9-transcript | 393 | 1823 |
| variant2-Q479H | | |
| EZH2 | 394 | 1824 |
| FBXW10 | 395 | 1825 |
| FBXW10-D318N | 396 | 1826 |
| CHEK2 | 397 | 1827 |
| BCOR | 398 | 1828 |
| BCOR-V896L | 399 | 1829 |
| BCOR-A165P | 400 | 1830 |
| ASXL1 | 401 | 1831 |
| PHF6 | 402 | 1832 |
| SF3B1 | 403 | 1833 |

### BRIEF DESCRIPTION OF THE DRAWINGS

[0063] FIG. 1 depicts Matador Cytotoxicity assay with different CD19 CAR-T cell products generated using Perixafor mobilized blood cells on RAJI cells stably expressing LucPPe.

[0064] FIG. 2 depicts Matador Cytotoxicity assay with different CD19 CAR-T cell products generated using Perixafor mobilized blood cells on Nalm6 cells stably expressing LucPPe.

[0065] FIG. 3 depicts the effect of TRAIL antibody on PMA-induced IL1α production.

[0066] FIG. 4 depicts TRAIL antibody blocks IL1α production by THP1 cells when co-cultured with CD19 CAR-T cells in the presence of CD19-expressing BV173 cells.

[0067] FIG. 5 depicts TRAIL antibody blocks IL1α production by PMA-differentiated THP1 cells when co-cultured with CD19 CAR-T cells in the presence of CD19-expressing BV173 cells.

### DETAILED DESCRIPTION

[0068] Unless defined otherwise, all technical and scientific terms used herein have the same meaning as commonly understood by one of ordinary skill in the art to which the disclosure pertains.

[0069] The term “a”, “an” and “the” refers to one or to more than one (i.e., to at least one) of the grammatical object of the article. By way of example, “an element” means one element or more than one element.

[0070] The term “about” when referring to a measurable value such as an amount, a temporal duration, and the like, is meant to encompass variations of ±20% or in some instances ±10%, or in some instances ±5%, or in some instances ±1%, or in some instances ±0.1% from the specified value, as such variations are appropriate to perform the disclosed methods.

[0071] The term “Chimeric Antigen Receptor” or alternatively a “CAR” refers to a set of polypeptides, typically two in the simplest embodiments, which when in an immune effector cell, provides the cell with specificity for a target cell, typically a cancer cell, and with intracellular signal generation. In some embodiments, a CAR comprises at least an extracellular antigen binding domain, a transmembrane domain and a cytoplasmic signaling domain (also referred to herein as “an intracellular signaling domain”) comprising a functional signaling domain derived from a stimulatory molecule and/or costimulatory molecule as defined below. In some aspects, the set of polypeptides are contiguous with each other. In some embodiments, the set of polypeptides include a dimerization switch that, upon the presence of a dimerization molecule, can couple the polypeptides to one another, e.g., can couple an antigen binding domain to an intracellular signaling domain. In one aspect, the stimulatory molecule is the zeta chain associated with the T cell receptor complex. In one aspect, the cytoplasmic signaling domain further comprises one or more functional signaling domains derived from at least one costimulatory molecule as defined below. In one aspect, the costimulatory molecule is chosen from the costimulatory molecules described herein, e.g., 41BB or 4-1BB (i.e., CD137), CD27, GITR, OX40, BCMA and/or CD28. In one aspect, the CAR comprises a chimeric fusion protein comprising an extracellular antigen binding domain, a transmembrane domain and an intracellular signaling domain comprising a functional signaling domain derived from a stimulatory molecule. In one aspect, the CAR comprises a chimeric fusion protein comprising an extracellular antigen binding domain, a transmembrane domain and an intracellular signaling domain comprising a functional signaling domain derived from a costimulatory molecule and a functional signaling domain derived from a stimulatory molecule. In one aspect, the CAR comprises a chimeric fusion protein comprising an extracellular antigen binding domain, a transmembrane domain and an intracellular signaling domain comprising two functional signaling domains derived from one or more costimulatory molecule(s) and a functional signaling domain derived from a stimulatory molecule. In one aspect, the CAR comprises a chimeric fusion protein comprising an extracellular antigen binding domain, a transmembrane domain and an intracellular signaling domain comprising at least two functional signaling domains derived from one or more costimulatory molecule(s) and a functional signaling domain derived from a stimulatory molecule. In one aspect, the CAR comprises an optional leader sequence at the amino-terminus (N-ter) of the CAR fusion protein. In one aspect, the CAR further comprises a leader sequence at the N-terminus of the extracellular antigen binding domain, wherein the leader sequence is optionally cleaved from the antigen binding domain (e.g., a scFv) during cellular processing and localization of the CAR to the cellular membrane. As used herein, the term “CAR” or “CARs” also encompasses newer approaches to conferring antigen specificity onto cells, including but not limited to Antibody-TCR chimeric molecules or AbTCR (WO 2017/070608 A1), TCR receptor fusion proteins or TFP (WO 2016/187349 A1), chimeric T cell receptors or cTCR and Synthetic Immune Recptors (PCT/US17/64379).

[0072] A CAR that comprises an antigen binding domain (e.g., a scFv, or TCR) that targets a specific tumor maker X, such as those described herein, is also referred to as XCAR. For example, a CAR that comprises an antigen binding domain that targets CD19 is referred to as CD19CAR.

[0073] The term “signaling domain” refers to the functional portion of a protein which acts by transmitting information within the cell to regulate cellular activity via defined signaling pathways by generating second messengers or functioning as effectors by responding to such messengers.

[0074] The term “costimulatory ligand” or “ligand of a costimulatory receptor” refers to a protein or polypeptide that binds to a co-stimulatory receptor, e.g., a costimulatory receptor expressed herein, e.g., DcR1, DcR2, CD27, CD28, 41BB, OX40, GITR, BCMA. Exemplary costimulatory ligands include CD70, CD80, CD86, 41BBL, OX40L, GITRL, BAFF and TRAIL. Binding of the costimulatory ligand to its cognate receptor on immune cells may lead to initiation of a signal transduction pathway that promotes the proliferation, activation, cytokine secretion and/or differentiation of the immune cells. Some costimulatory ligands, such as TRAIL, may bind to more than one receptor. Thus, TRAIL binds to at least four receptors, DcR1, DcR2, DR4 and DR5. Binding of TRAIL to DcR2 is known to activate NF-κB pathway without inducing cell death. In contrast, binding of TRAIL to DR4 and DR5 is known to activate NF-κB as well as cell death depending on cellular context.

[0075] The term “antibody,” as used herein, refers to a protein, or polypeptide sequence derived from an immunoglobulin molecule which specifically binds with an antigen. Antibodies can be polyclonal or monoclonal, multiple or single chain, or intact immunoglobulins, and may be derived from natural sources or from recombinant sources. Antibodies can be tetramers of immunoglobulin molecules.

[0076] The term “antibody fragment” refers to at least one portion of an antibody, that retains the ability to specifically interact with (e.g., by binding, steric hinderance, stabilizing/destabilizing, spatial distribution) an epitope of an antigen. Examples of antibody fragments include, but are not limited to, Fab, Fab′, F(ab′h, Fv fragments, scFv antibody fragments, disulfide-linked Fvs (sdFv), a Fd fragment consisting of the VH and CHI domains, linear antibodies, single domain antibodies such as sdAb (either VL or VH), camelid VHH domains, multi-specific antibodies formed from antibody fragments such as a bivalent fragment comprising two Fab fragments linked by a disulfide brudge at the hinge region, and an isolated CDR or other epitope binding fragments of an antibody.

[0077] The term “scFv” refers to a fusion protein comprising at least one antibody fragment comprising a variable region of a light chain and at least one antibody fragment comprising a variable region of a heavy chain, wherein the light and heavy chain variable regions are contiguously linked, e.g., via a synthetic linker, e.g., a short flexible polypeptide linker, and capable of being expressed as a single chain polypeptide, and wherein the scFv retains the specificity of the intact antibody from which it is derived. Unless specified, as used herein an scFv may have the VL and VH variable regions in either order, e.g., with respect to the N-terminal and C-terminal ends of the polypeptide, the scFv may comprise VL-linker-VH or may comprise VH-linker-VL.

[0078] As used herein, the term “binding domain” or “antibody molecule” refers to a protein, e.g., an immunoglobulin chain or fragment thereof, comprising at least one immunoglobulin variable domain sequence. The term “binding domain” or “antibody molecule” encompasses antibodies and antibody fragments. In an embodiment, an antibody molecule is a multispecific antibody molecule, e.g., it comprises a plurality of immunoglobulin variable domain sequences, wherein a first immunoglobulin variable domain sequence of the plurality has binding specificity for a first epitope and a second immunoglobulin variable domain sequence of the plurality has binding specificity for a second epitope. In an embodiment, a multispecific antibody molecule is a bispecific antibody molecule. A bispecific antibody has specificity for no more than two antigens. A bispecific antibody molecule is characterized by a first immunoglobulin variable domain sequence which has binding specificity for a first epitope and a second immunoglobulin variable domain sequence that has binding specificity for a second epitope.

[0079] The term “antibody heavy chain,” refers to the larger of the two types of polypeptide chains present in antibody molecules in their naturally occurring conformations, and which normally determines the class to which the antibody belongs.

[0080] The term “antibody light chain,” refers to the smaller of the two types of polypeptide chains present in antibody molecules in their naturally occurring conformations. Kappa (K) and lambda (A) light chains refer to the two major antibody light chain isotypes.

[0081] The term “recombinant antibody” refers to an antibody which is generated using recombinant DNA technology, such as, for example, an antibody expressed by a bacteriophage or yeast expression system.

[0082] The term “antigen” or “Ag” refers to a molecule that provokes an immune response.

[0083] The term “anti-cancer effect” refers to a biological effect which can be manifested by various means, including but not limited to, e.g., a decrease in tumor volume, a decrease in the number of cancer cells, a decrease in the number of metastases, an increase in life expectancy, decrease in cancer cell proliferation, decrease in cancer cell survival, or amelioration of various physiological symptoms associated with the cancerous condition. An “anti-cancer effect” can also be manifested by the ability of the peptides, polynucleotides, cells and antibodies in prevention of the occurrence of cancer in the first place. The term “anti-tumor effect” refers to a biological effect which can be manifested by various means, including but not limited to, e.g., a decrease in tumor volume, a decrease in the number of tumor cells, a decrease in tumor cell proliferation, or a decrease in tumor cell survival.

[0084] The term “autologous” refers to any material derived from the same individual to whom it is later to be re-introduced into the individual.

[0085] The term “allogeneic” refers to any material derived from a different animal of the same species as the individual to whom the material is introduced

[0086] The term “cancer” refers to a disease characterized by the uncontrolled growth of aberrant cells.

[0087] The terms “tumor” and “cancer” are used interchangeably herein, e.g., both terms encompass solid and liquid, e.g., diffuse or circulating, tumors. As used herein, the term “cancer” or “tumor” includes premalignant, as well as malignant cancers and tumors.

[0088] “Derived from” as that term is used herein, indicates a relationship between a first and a second molecule. It generally refers to structural similarity between the first molecule and a second molecule and does not connotate or include a process or source limitation on a first molecule that is derived from a second molecule. For example, in the case of an intracellular signaling domain that is derived from a CD3zeta molecule, the intracellular signaling domain retains sufficient CD3zeta structure such that is has the required function, namely, the ability to generate a signal under the appropriate conditions. It does not connotate or include a limitation to a particular process of producing the intracellular signaling domain, e.g., it does not mean that, to provide the intracellular signaling domain, one must start with a CD3zeta sequence and delete unwanted sequence, or impose mutations, to arrive at the intracellular signaling domain.

[0089] The phrase “disease associated with expression of a tumor antigen as described herein” includes, but is not limited to, a disease associated with expression of a tumor antigen as described herein or condition associated with cells which express a tumor antigen as described herein including, e.g., proliferative diseases such as a cancer or malignancy or a precancerous condition such as a myelodysplasia, a myelodysplastic syndrome or a preleukemia; or a noncancer related indication associated with cells which express a tumor antigen as described herein. Non-cancer related indications associated with expression of a tumor antigen as described herein include, but are not limited to, e.g., autoimmune disease, (e.g., lupus), inflammatory disorders (allergy and asthma) and transplantation. In some embodiments, the tumor antigen-expressing cells express, or at any time expressed, mRNA encoding the tumor antigen. In an embodiment, the tumor antigen-expressing cells produce the tumor antigen protein (e.g., wild-type or mutant), and the tumor antigen protein may be present at normal levels or reduced levels. In an embodiment, the tumor antigen-expressing cells produced detectable levels of a tumor antigen protein at one point, and subsequently produced substantially no detectable tumor antigen protein.

[0090] The term “conservative sequence modifications” refers to amino acid modifications that do not significantly affect or alter the binding characteristics of the antibody or antibody fragment containing the amino acid sequence.

[0091] The term “stimulation,” refers to a primary response induced by binding of a stimulatory molecule (e.g., a TCR/CD3 complex or CAR) with its cognate ligand (or tumor antigen in the case of a CAR) thereby mediating a signal transduction event, such as, but not limited to, signal transduction via the TCR/CD3 complex or signal transduction via the appropriate NK receptor or signaling domains of the CAR. Stimulation can mediate altered expression of certain molecules.

[0092] The term “stimulatory molecule,” refers to a molecule expressed by aan immune cell (e.g., T cell, NK cell, B cell) that provides the cytoplasmic signaling sequence(s) that regulate activation of the immune cell in a stimulatory way for at least some aspect of the immune cell signaling pathway. In one aspect, the signal is a primary signal that is initiated by, for instance, binding of a TCR/CD3 complex with an MHC molecule loaded with peptide, and which leads to mediation of a T cell response, including, but not limited to, proliferation, activation, differentiation, and the like. A primary cytoplasmic signaling sequence (also referred to as a “primary signaling domain”) that acts in a stimulatory manner may contain a signaling motif which is known as immunoreceptor tyrosine-based activation motif or ITAM. In a specific CAR of the disclosure, the intracellular signaling domain in any one or more CARS of the disclosure comprises an intracellular signaling sequence, e.g., a primary signaling sequence of CD3-zeta. In a specific CAR of the disclosure, the primary signaling sequence of CD3-zeta is the sequence provided as SEQ ID NO (DNA): 431 and SEQ ID NO (PRT): 1858, or the equivalent residues from a non-human species, e.g., mouse, rodent, monkey, ape and the like. In a specific CAR of the disclosure, the primary signaling sequence of CD3-zeta is the sequence as provided in SEQ ID NO (DNA): 432 and SEQ ID NO (PRT): 1859, or the equivalent residues from a non-human species, e.g., mouse, rodent, monkey, ape and the like.

[0093] The term “antigen presenting cell” or “APC” refers to any cell such as an accessory cell (e.g., a B-cell, a dendritic cell, and the like) or cell line (e.g., cancer cell line, e.g., breast cancer cell line, e.g, MCF7 cell line) that presents an antigen that can be recognized by an immune cell. An APC may display a foreign antigen complexed with major histocompatibility complexes (MHC's) on its surface. T-cells may recognize these complexes using their T-cell receptors (TCRs). APCs process antigens and present them to T-cells. An APC may present an antigen independent of MHC. As an example, a B lymphocyte or a B cell line (e.g., REC-1) that express CD19 may serve as an APC for T cells expressing a CAR, e.g., FMC63-BBz CAR (SEQ ID NO: 2822) directed against CD19. An APC may present an antigen that is recognized by an immune cell in the presence of a bispecific or multispecific engager. As an example, a B lymphocyte or a B cell line (e.g., REC-1) that express CD19 may serve as an APC for T cells in the presence of a CD3×CD19 bispecific antibody, e.g., Blinatumomab. An APC may be a normal cell, an immortalized cell or a cancer cell. An APC may be a cell line. The SEQ ID NOs of several antigens that can be expressed on the surface of cells to serve as antigen presenting cells for the methods of the disclosure are presented in Table 7D.

[0094] The term “antigen presenting substrate” or “APS” refers to any substrate such as a beads, microbeads, agarose bead, magnetic bead, membrane, plate, bubble, nano-particles that presents an antigen that can be recognized by an immune cell. An APS may display a foreign antigen complexed with major histocompatibility complexes (MHC's) on its surface. T-cells may recognize these complexes using their T-cell receptors (TCRs). An APS may present an antigen independent of MHC. As an example, a bead or a plate coated with CD19 ectodomain may serve as an APS for T cells expressing a CAR, e.g., FMC63-BBz CAR (SEQ ID NO: 2822) directed against CD19. An APS may present an antigen that is recognized by an immune cell in the presence of a bispecific or multispecific engager. As an example, a beads or plate coated with CD19 ectodomain (ECD) may serve as an APS for T cells in the presence of a CD3×CD19 bispecific antibody, e.g., Blinatumomab. The SEQ ID NOs of several antigens that can be conjugated to substrates (e.g. beads or membrane) to serve as antigen presenting substrates for the methods of the disclosure are presented in Table 7D.

[0095] An “intracellular signaling domain,” as the term is used herein, refers to an intracellular portion of a molecule. The intracellular signaling domain generates a signal that promotes an immune effector function of the CAR containing cell, e.g., a CAR-T cell.

[0096] The term a “costimulatory molecule” refers to a cognate binding partner on a T cell that specifically binds with a costimulatory ligand, thereby mediating a costimulatory response by the T cell, such as, but not limited to, proliferation.

[0097] A “costimulatory intracellular signaling domain” can be the intracellular portion of a costimulatory molecule. The intracellular signaling domain can comprise the entire intracellular portion, or the entire native intracellular signaling domain, of the molecule from which it is derived, or a functional fragment or derivative thereof.

[0098] A “CXCR4 signaling inhibitor” is an exogenous factor, such as a pharmaceutical compound or molecule, that inhibits or prevents the activation of CXCR4 by its ligand C—X—C motif ligand 12 (CXCL12) and thereby blocks or inhibits CXCR4 signaling in cells.

[0099] Suitable CXCR4 signaling inhibitors may be identified using standard in vitro or ex vivo CXCL12/CXCR4 ligation assays, such as chemotaxis or increased free intracellular Ca 2+. For example, the absence of rapid, transient increases in free intracellular Ca 2+ when CXCR4 on a cell surface is exposed to CXCL12 may be indicative of the presence of a CXCR4 signaling inhibitor.

[0100] Preferred examples of a CXCR4 signaling inhibitor includes, but is not limited to, a CXCR4 antagonist and/or a CXCL12 antagonist.

[0101] In the disclosure, a “CXCR4 antagonist” is defined as a molecule that inhibits CXCR4 signaling by binding to or interacting with CXCR4 to prevent or inhibit the binding and/or activation of CXCR4 by CXCL12, thereby inhibiting CXCR4 signaling. Preferred examples of a CXCR4 antagonist, include, but are not limited to an anti-CXCR4 antibody, examples of which are well known in the art. For example, preferred anti-CXCR4 antibodies include, but are not limited to BMS-936564/MDX-1338 (Kuhne et al (2013) Clin Cancer Res 19(2) 357-366).

[0102] Additionally, CXCR4 antagonists include peptides, such as LY2510924 (Eli Lilly) or small organic compounds, such as 1,1′-[1,4-phenylenebis(methylene)]bis [1,4,8,11-tetraazacyclotetradecane] (AMD3100; Plerixafor), N, N-dipropyl-N-[4-({[(1H-imidazol-2-yl)methyl)benzyl][(1-methyl-1H-imidazol-2-yl) methyl]amino]methyl)benzyl]-N-methylbutane-1, 4-diamine tri(2R, 3R)-tartrate (KRH-3955), ([5-(4-methyl-1-piperazinyl)-2-({methyl [(8S)-5,6,7,8-tetrahydro-8-quinolinyl]amino}methyl)imidazo[1,2-a]pyridin-3-yl]methanol) (GSK812397; Jenkinson et al., Antimicrob. Agents Chemother. 2010, 54(2):817), and N′-(1H-benzimidazol-2-ylmethyl)-N′-(5,6,7,8-tetrahydroquinolin-8-yl)butane-1,4-diamine (AMD11070; Moyle et al Clin. Infect. Dis. 48:798-805)).

[0103] In the disclosure, a “CXCL12 antagonist” is defined as a molecule that inhibits CXCR4 signaling by binding to or inhibiting CXCL12 from binding and/or activating CXCR4, thereby inhibiting CXCR4 signaling. CXCL12 may, for example, be produced by stromal cells in the cancerous tumor that express fibroblast activation protein (FAP). Preferred examples of a CXCL12 antagonist, include, but are not limited to an anti-CXCL12 antibody, which are well known in the art. Examples of such anti-CXCL12 antibodies, include, but are not limited to an anti-CXCL12 antibody from R&D Systems (MAB310) or SDF-1 antibody. Other examples of CXCL12 antagonists include, but are not limited to, NOX-A12.

[0104] Other suitable CXCR4 and CXCL12 antagonists include non-antibody specific binding molecules, such as adnectins, affibodies, avimers, anticalins, tetranectins, DARPins, mTCRs, engineered Kunitz-type inhibitors, nucleic acid aptamers and spiegelmers, peptide aptamers and cyclic and bicyclic peptides (Ruigrok et al Biochem. J. (2011) 436, 1-13; Gebauer et al Curr Opin Chem Biol. (2009)(3):245-55). Suitable specific binding molecules for use as CXCR4 and CXCL12 antagonists may be generated using standard techniques.

[0105] CXCR4 signaling is mediated by activation ofphosphoinositide 3-kinases. Other suitable CXCR4 signaling inhibitors include PI 3-kinase inhibitors, for example inhibitors of p110 delta or p110 gamma isoforms of PI3K.

[0106] The term “4-1BB” refers to a member of the TNFR superfamily with an amino acid sequence provided as GenBank Acc. No. AAA62478.2, or the equivalent residues from a non-human species, e.g., mouse, rodent, monkey, ape and the like; and a “4-1BB costimulatory domain” is defined as amino acid residues 214-255 of GenBank Acc. No. AAA62478.2, or the equivalent residues from a non-human species, e.g., mouse, rodent, monkey, ape and the like. In one aspect, the “4-1BB costimulatory domain” is the sequence provided as SEQ ID NO: 1857 or the equivalent residues from a non-human species, e.g., mouse, rodent, monkey, ape and the like.

[0107] “Immune cell” as that term is used herein, refers to a cell that is involved in an immune response. Examples of immune effector cells include T cells, e.g., alpha/beta T cells and gamma/delta T cells, B cells, natural killer (NK) cells, natural killer T(NKT) cells, mast cells, monocytes, macrophage, and myeloic-derived phagocytes.

[0108] “Immune effector cell,” as that term is used herein, refers to a cell that is involved in an immune response, e.g., in the promotion of an immune effector response. Examples of immune effector cells include T cells, e.g., alpha/beta T cells and gamma/delta T cells, B cells, natural killer (NK) cells, natural killer T(NKT) cells, mast cells, monocytes, macrophage, and myeloic-derived phagocytes.

[0109] “Immune effector function or immune effector response or immune response,” as that term is used herein, refers to function or response, e.g., of an immune effector cell, that enhances or promotes an immune attack of a target cell. E.g., an immune effector function or response refers a property of a T or NK cell that promotes killing or the inhibition of growth or proliferation, of a target cell. In the case of a T cell, primary stimulation and co-stimulation are examples of immune effector function or response.

[0110] “Immune therapy” as the term is used herein, refers to a form of therapy that involves the use of immune cells or products of immune cells. Examples of immune therapy include bispecific T cell engagers (e.g., Blinatumomab), DARTs, PD-1 inhibitors, PDL-1 inhibitors, CAR-T, CAR-NK, macrophage-CAR, TCR-T and TIL therapies as well as vaccination approaches.

[0111] “Cell therapy”, “Adoptive cell therapy”, “Cellular Therapy” or “Immune cell therapy” as the term is used herein, refers to a form of therapy that involves the use of cells, e.g., immune cells, in the prevention and/or treatment of a disease. Examples of cell therapy include allogeneic stem cell transplant, CAR-T, CAR-NK, macrophage-CAR, TCR-T and TIL therapies as well as T cell vaccination approaches. A form of cell therapy is immune cell therapy, e.g., CAR-T cell therapy. As bispecific T cell engagers also engage T cells, they are also considered a form of immune cell therapy.

[0112] The terms “Cell therapy product”, “Cellular Therapy product” or “Immune cell therapy product” as used herein, refer to a product used for the purpose of cell therapy.

[0113] The term “encoding” refers to the inherent property of specific sequences of nucleotides in a polynucleotide, such as a gene, a cDNA, or an mRNA, to serve as templates for synthesis of other polymers and macromolecules in biological processes having either a defined sequence of nucleotides (e.g., rRNA, tRNA and mRNA) or a defined sequence of amino acids and the biological properties resulting therefrom. Unless otherwise specified, a “nucleotide sequence encoding an amino acid sequence” includes all nucleotide sequences that are degenerate versions of each other and that encode the same amino acid sequence.

[0114] The term “effective amount” or “therapeutically effective amount” are used interchangeably herein, and refer to an amount of a compound, formulation, material, or composition, as described herein effective to achieve a particular biological result.

[0115] The term “endogenous” refers to any material from or produced inside an organism, cell, tissue or system.

[0116] The term “exogenous” refers to any material introduced from or produced outside an organism, cell, tissue or system.

[0117] The term “expression” refers to the transcription and/or translation of a particular nucleotide sequence driven by a promoter.

[0118] The term “transfer vector” refers to a composition of matter which comprises an isolated nucleic acid and which can be used to deliver the isolated nucleic acid to the interior of a cell. Examples of viral transfer vectors include, but are not limited to, adenoviral vectors, adeno-associated virus vectors, retroviral vectors, lentiviral vectors, and the like.

[0119] The term “expression vector” refers to a vector comprising a recombinant polynucleotide comprising expression control sequences operatively linked to a nucleotide sequence to be expressed.

[0120] The term “lentivirus” refers to a genus of the Retroviridae family.

[0121] The term “lentiviral vector” refers to a vector derived from at least a portion of a lentivirus genome, including especially a self-inactivating lentiviral vector.

[0122] The term “homologous” or “identity” refers to the subunit sequence identity between two polymeric molecules, e.g., between two nucleic acid molecules, such as, two DNA molecules or two RNA molecules, or between two polypeptide molecules.

[0123] “Humanized” forms of non-human (e.g., murine) antibodies are chimeric immunoglobulins, immunoglobulin chains or fragments thereof (such as Fv, Fab, Fab′, F(ab′)2 or other antigen-binding subsequences of antibodies) which contain minimal sequence derived from non-human immunoglobulin.

[0124] “Fully human” refers to an immunoglobulin, such as an antibody or antibody fragment, where the whole molecule is of human origin or consists of an amino acid sequence identical to a human form of the antibody or immunoglobulin.

[0125] The term “isolated” means altered or removed from the natural state.

[0126] The term “operably linked” or “transcriptional control” refers to functional linkage between a regulatory sequence and a heterologous nucleic acid sequence resulting in expression of the latter.

[0127] The term “parenteral” administration of an immunogenic composition includes, e.g., subcutaneous (s.c.), intravenous (i.v.), intramuscular (i.m.), or intrastemal injection, intratumoral, or infusion techniques.

[0128] The term “mobilized” cell e.g., a mobilized immune cell, a mobilized immune effector cell or mobilized T cell refers to a cell that has been mobilized from its normal location. For example, administration of CXCR antagonist can be used to mobilize immune cells from bone marrow, lymph organs, tissues and tumors into peripheral circulation from where they can be collected by leukapheresis and used for immune cell therapy applications, e.g., manufacturing of CAR-T cells or TCR-T cells or TILs, described in this disclosure. Other exemplary mobilization agents that can be used to mobilize cells include cytokines (e.g., G-CSF, GM-CSF or sargramostim, Neulasta or Pegfilgastrim etc.), chemotherapy drugs (e.g cyclophosphamide). Tyrosine kinase inhibitors (e.g., Dasatinib), beta2 adrenergic agonists (e.g., epinephrine) and exercise.

[0129] The term “mobilization agent” refers to an agent that can be used to mobilize a cell from its normal location. Exemplary mobilization agents that can be used to mobilize cells include cytokines (e.g., G-CSF, GM-CSF or sargramostim, Neulasta or Pegfilgastrim etc.), chemotherapy drugs (e.g. cyclophosphamide). Tyrosine kinase inhibitors (e.g., Dasatinib), beta2 adrenergic agonists (e.g., epinephrine) and exercise.

[0130] The term “nucleic acid” or “polynucleotide” refers to deoxyribonucleic acids (DNA) or ribonucleic acids (RNA) and polymers thereof in either single- or double-stranded form. Unless specifically limited, the term encompasses nucleic acids containing known analogues of natural nucleotides that have similar binding properties as the reference nucleic acid and are metabolized in a manner similar to naturally occurring nucleotides. Unless otherwise indicated, a particular nucleic acid sequence also implicitly encompasses conservatively modified variants thereof (e.g., degenerate codon substitutions), alleles, orthologs, SNPs, and complementary sequences as well as the sequence explicitly indicated.

[0131] The terms “peptide,” “polypeptide,” and “protein” are used interchangeably, and refer to a compound comprised of amino acid residues covalently linked by peptide bonds.

[0132] The term “promoter” refers to a DNA sequence recognized by the synthetic machinery of the cell, or introduced synthetic machinery, required to initiate the specific transcription of a polynucleotide sequence.

[0133] The term “promoter/regulatory sequence” refers to a nucleic acid sequence which is required for expression of a gene product operably linked to the promoter/regulatory sequence. In some instances, this sequence may be the core promoter sequence and in other instances, this sequence may also include an enhancer sequence and other regulatory elements which are required for expression of the gene product. The promoter/regulatory sequence may, for example, be one which expresses the gene product in a tissue specific manner.

[0134] The term “constitutive” promoter refers to a nucleotide sequence which, when operably linked with a polynucleotide which encodes or specifies a gene product, causes the gene product to be produced in a cell under most or all physiological conditions of the cell.

[0135] The term “inducible” promoter refers to a nucleotide sequence which, when operably linked with a polynucleotide which encodes or specifies a gene product, causes the gene product to be produced in a cell substantially only when an inducer which corresponds to the promoter is present in the cell.

[0136] The term “tissue-specific” promoter refers to a nucleotide sequence which, when operably linked with a polynucleotide encodes or specified by a gene, causes the gene product to be produced in a cell substantially only if the cell is a cell of the tissue type corresponding to the promoter.

[0137] The terms “cancer associated antigen” or “tumor antigen” interchangeably refers to a molecule (typically a protein, carbohydrate or lipid) that is expressed on the surface of a cancer cell, either entirely or as a fragment (e.g., MHC/peptide), and which is useful for the preferential targeting of a pharmacological agent to the cancer cell.

[0138] The term “tumor-supporting antigen” or “cancer-supporting antigen” interchangeably refer to a molecule (typically a protein, carbohydrate or lipid) that is expressed on the surface of a cell that is, itself, not cancerous, but supports the cancer cells, e.g., by promoting their growth or survival e.g., resistance to immune cells.

[0139] The term “flexible polypeptide linker” or “linker” as used in the context of a scFv refers to a peptide linker that consists of amino acids such as glycine and/or serine residues used alone or in combination, to link variable heavy and variable light chain regions together. In one embodiment, the flexible polypeptide linker is a Gly/Ser linker and comprises the amino acid sequence (Gly-Gly-Gly-Ser)n, where n is a positive integer equal to or greater than 1. For example, n=1, n=2, n=3, n=4, n=5 and n=6, n=7, n=8, n=9 and n=10. In one embodiment, the flexible polypeptide linkers include, but are not limited to, or (Gly4 Ser)3 (SEQ ID NO (DNA):411 and SEQ ID NO (PRT):1838). In another embodiment, the linkers include multiple repeats of (Gly2Ser), (GlySer) or (Gly3Ser). Also included within the scope of the disclosure are linkers described in WO2012/138475, incorporated herein by reference).

[0140] As used herein, a 5′ cap (also termed an RNA cap, an RNA 7-methylguanosine cap or an RNA m⁷G cap) is a modified guanine nucleotide that has been added to the “front” or 5′ end of a eukaryotic messenger RNA shortly after the start of transcription.

[0141] As used herein, “in vitro transcribed RNA” refers to RNA, preferably mRNA, that has been synthesized in vitro.

[0142] As used herein, a “poly(A)” is a series of adenosines attached by polyadenylation to the mRNA. In the preferred embodiment of a construct for transient expression, the polyA is between 50 and 5000 (SEQ ID NO: 341-343), preferably greater than 64, more preferably greater than 100, most preferably greater than 300 or 400. poly(A) sequences can be modified chemically or enzymatically to modulate mRNA functionality such as localization, stability or efficiency of translation.

[0143] The term “prophylaxis” as used herein means the prevention of or protective treatment for a disease or disease state.

[0144] As used herein, “polyadenylation” refers to the covalent linkage of a polyadenylyl moiety, or its modified variant, to a messenger RNA molecule.

[0145] The term “signal transduction pathway” refers to the biochemical relationship between a variety of signal transduction molecules that play a role in the transmission of a signal from one portion of a cell to another portion of a cell. The phrase “cell surface receptor” includes molecules and complexes of molecules capable of receiving a signal and transmitting signal across the membrane of a cell.

[0146] The term “subject” is intended to include living organisms in which an immune response can be elicited (e.g., mammals, human).

[0147] The term, a “substantially purified” cell refers to a cell that is essentially free of other cell types.

[0148] As used herein, “transient” refers to expression of a non-integrated transgene for a period of hours, days or weeks, wherein the period of time of expression is less than the period of time for expression of the gene if integrated into the genome or contained within a stable plasmid replicon in the host cell.

[0149] As used herein, the terms “treat”, “treatment” and “treating” refer to the reduction or amelioration of the progression, severity and/or duration of a proliferative disorder, or the amelioration of one or more symptoms (preferably, one or more discernible symptoms) of a proliferative disorder resulting from the administration of one or more therapies (e.g., one or more therapeutic agents such as a CAR of the disclosure).

[0150] The term “therapeutic” as used herein means a treatment. A therapeutic effect is obtained by reduction, suppression, remission, or eradication of a disease state.

[0151] As used herein, the terms “Regulatory T cells” or “TREGs” refer to T cells which have a role in regulating or suppressing other cells in the immune system. Tregs control the immune response to self and foreign particles (antigens) and help prevent autoimmune disease.

[0152] In the context of the disclosure, “tumor antigen” or “hyperproliferative disorder antigen” or “antigen associated with a hyperproliferative disorder” refers to antigens that are common to specific hyperproliferative disorders. In certain aspects, the hyperproliferative disorder antigens of the disclosure are derived from, cancers including but not limited to primary or metastatic melanoma, thymoma, lymphoma, sarcoma, lung cancer, liver cancer, non-Hodgkin lymphoma, Hodgkin lymphoma, leukemias, uterine cancer, cervical cancer, bladder cancer, kidney cancer and adenocarcinomas such as breast cancer, prostate cancer, ovarian cancer, pancreatic cancer, and the like.

[0153] The term “transfected” or “transformed” or “transduced” refers to a process by which exogenous nucleic acid is transferred or introduced into the host cell. A “transfected” or “transformed” or “transduced” cell is one which has been transfected, transformed or transduced with exogenous nucleic acid. The cell includes the primary subject cell and its progeny.

[0154] The term “specifically binds,” refers to an antibody, or a ligand, which recognizes and binds with a binding partner (e.g., a tumor antigen) protein present in a sample, but which antibody or ligand does not substantially recognize or bind other molecules in the sample.

[0155] “Membrane anchor” or “membrane tethering domain”, as that termis used herein, refers to a polypeptide or moiety, e.g., a myristoyl group, sufficient to anchor an extracellular or intracellular domain to the plasma membrane.

[0156] “Switch domain,” as that term is used herein, e.g., when referring to an RCAR, refers to an entity, typically a polypeptide-based entity, that, in the presence of a dimerization molecule, associates with another switch domain. “Dimerization molecule,” as that term is used herein, e.g., when referring to an RCAR, refers to a molecule that promotes the association of a first switch domain with a second switch domain.

[0157] “Refractory” as used herein refers to a disease, e.g., cancer, that does not respond to a treatment.

[0158] Ranges: throughout this disclosure, various aspects of the disclosure can be presented in a range format. It should be understood that the description in range format is merely for convenience and brevity and should not be construed as an inflexible limitation on the scope of the disclosure. Accordingly, the description of a range should be considered to have specifically disclosed all the possible subranges as well as individual numerical values within that range. For example, description of a range such as from 1 to 6 should be considered to have specifically disclosed subranges such as from 1 to 3, from 1 to 4, from 1 to 5, from 2 to 4, from 2 to 6, from 3 to 6 etc., as well as individual numbers within that range, for example, 1, 2, 2.7, 3, 4, 5, 5.3, and 6. As another example, a range such as 95-99% identity, includes something with 95%, 96%, 97%, 98% or 99% identity, and includes subranges such as 96-99%, 96-98%, 96-97%, 97-99%, 97-98% and 98-99% identity. This applies regardless of the breadth of the range.

[0159] “Tet” as the term is used herein, refers to the family of genes, and the proteins encoded by said genes, of the ten-eleven translocation methlcytosine dioxygenase family. Tet includes, for example, Tet1, Tet2 and Tet3.

[0160] “Tet2” as the term is used herein, refers to gene, tet methylcytosine dioxygenase 2, and the protein encoded by said gene, the tet2 methylcytosine dioxygenase, which catalyzes the conversion of methylcytosine to 5-hydroxymethylcytosine.

TABLE 3
Nucleic Acid Reference SEQ of the exemplary
genes of the disclosure.

| | |
|---|---|
| BRD9 | |
| | NM_001009877 |
| | NM_001317951 |
| | NM_023924 |
| | NR_134296 |
| EZH2 | |
| | NM_001203247 |
| | NM_001203248 |
| | NM_001203249 |
| | NM_004456 |
| | NM_152998 |
| ASXL1 | |
| | NM_001164603 |
| | NM_015338 |
| KDM6A | |
| | NM_001291415 |
| | NM_001291416 |
| | NM_001291417 |
| | NM_001291418 |
| | NM_001291421 |
| | NM_021140 |
| | NR_111960 |
| PHF6 | |
| | NM_001015877 |
| | NM_032335 |
| | NM_032458 |
| SF3B1 | |
| | NM_001005526 |
| | NM_001308824 |
| | NM_012433 |
| CBFB | |
| | NM_001755 |
| | NM_022845 |
| RUNX1 | |
| | NM_001001890 |
| | NM_001122607 |
| | NM_001754 |
| PRDM1 | |
| | NM_001198 |
| | NM_182907 |
| HDAC2 | |
| | NM_001527 |
| | NR_033441 |
| | NR_073443 |
| EHMT2 | |
| | NM_001289413 |
| | NM_001289413 |
| | NM_001289413 |
| | NM_001289413 |
| | NM_001289413 |
| | NM_001289413 |
| | NM_001289413 |
| | NM_001318833 |
| | NM_001318833 |
| | NM_001318833 |
| | NM_001318833 |
| | NM_001318833 |
| | NM_001318833 |
| | NM_001318833 |
| | NM_006709 |
| | NM_006709 |
| | NM_006709 |
| | NM_006709 |
| | NM_006709 |
| | NM_006709 |
| | NM_006709 |
| | NM_025256 |
| | NM_025256 |
| | NM_025256 |
| | NM_025256 |
| | NM_025256 |
| | NM_025256 |
| | NM_025256 |
| SMARCA4 | |
| | NM_001128844 |
| | NM_001128845 |
| | NM_001128846 |
| | NM_001128847 |
| | NM_001128848 |
| | NM_001128849 |
| | NM_003072 |
| CREBBP | |
| | NM_001079846 |
| | NM_004380 |
| KMT2D | |
| | NM_003482.3 |
| KMT2C | |
| | NM_170606.2 |
| KMT2B | |
| | NM_014727.2 |
| Tet2 | |
| | NM_001127208 |
| | NM_017628 |
| Stat5b | |
| | NM_012448.3 |
| Stat3 | |
| | NM_003150.3 |
| | NM_139276.2 |
| | NM_213662.1 |
| JAK3 | |
| | NM_000215.3 |
| JAK1 | |
| | NM_001320923.1 |
| | NM_001321852.1 |
| | NM_001321853.1 |
| | NM_001321854.1 |
| | NM_001321855.1 |
| | NM_001321856.1 |
| | NM_001321857.1 |
| | NM_002227.3 |
| BRAF | |
| | NM_001354609 |
| | NM_004333 |
| | NR_148928 |
| CARD11 | |
| | NM_001324281 |
| | NM_032415 |
| FBXW10 | |
| | NM_001267585.1 |
| | NM_001267586.1 |
| IL2RG | |
| | NM_000206.2 |
| BCOR | |
| | NM_001123383.1 |
| | NM_001123384.1 |
| | NM_001123385.1 |
| | NM_017745.5 |
| CHEK2 | |
| | NM_001005735 |
| | NM_001257387 |
| | NM_001349956 |
| | NM_007194 |
| | NM_145862 |
| YY1 | |
| | NM_003403.4 |
| ATM | |
| | NM_000051 |
| | NM_001351834 |
| | NM_001351835 |
| | NM_001351836 |
| TRAIL | |
| (TNFSF10) | |
| | NM_001190942.1 |
| | NM_001190943.1 |
| | NM_003810.3 |
| DR5 | |
| (TNFRSF10B) | |
| | NM_003842.4 |
| | NM_147187.2 |
| DR4 | |
| (TNFRSF10A) | |
| | NM_003844.3 |

[0161] “X inhibitor” or “Inhibitor X” as the terms are used herein, refer to molecule, or group of molecules (e.g., a system) that reduces or eliminates the function and/or expression of corresponding “X” gene and/or protein where “X” represents BRD9, EZH2, MLL2, MLL3, MLL4, methylcytosine dioxygenase genes (e.g., Tet1, Tet2, Tet3), ATM, CHEK, FBXW10, BCOR, FAT1, ASXL1, PHF6, SF3B1, YY1, CBFb, Runx1, EHMT2 (G9A), SMARCA4, CREBBP, PRDM1/BLIMP1, HDAC2, TRAIL or DR5. In embodiments, “X” inhibitor is a molecule that inhibits the expression of “X”, e.g., reduces or eliminates expression of “X”. In embodiments, the “X” inhibitor is a molecule that inhibits the function of “X”. An example of “X” inhibitor that inhibits the expression of “X” is a gene editing system, e.g., as described herein, that is targeted to nucleic acid within the “X” gene, or its regulatory elements, such that modification of the nucleic acid at or near the gene editing system binding site(s) is modified to reduce or eliminate expression of “X”. Another example of a “X” inhibitor that inhibits the expression of “X” is a nucleic acid molecule, e.g., RNA molecule, e.g., a short hairpin RNA (shRNA) or short interfering RNA (siRNA), capable of hybridizing with “X” mRNA and causing a reduction or elimination of “X” translation. “X” inhibitors also include nucleic acids encoding molecules which inhibit “X” expression (e.g., nucleic acid encoding an anti-“X” shRNA or siRNA, or nucleic acid encoding one or more, e.g., all, components of an anti-“X” gene editing system). An example of a molecule that inhibits the function of “X” is a molecule, e.g., a protein or small molecule which inhibits one or more activities of “X”. An example is a small molecule inhibitor of “X”. Another example is a dominant negative “X” protein. Another example is a dominant negative version of a “X” binding partner. Another example is a molecule, e.g., a small molecule, which inhibits a “X” binding partner. “X” inhibitors also include nucleic acids encoding inhibitors of “X” function.

[0162] “BRD9 inhibitor” as the term is used herein, refers to a molecule, or group of molecules (e.g., a system) that reduces or eliminates the function and/or expression of BRD9. In embodiments, a BRD9 inhibitor is a molecule that inhibits the expression of BRD9, e.g., reduces or eliminates expression of BRD9. In embodiments, the BRD9 inhibitor is a molecule that inhibits the function of BRD9. An example of BRD9 inhibitor that inhibits the expression of BRD9 is a gene editing system, e.g., as described herein, that is targeted to nucleic acid within the BRD9 gene, or its regulatory elements, such that modification of the nucleic acid at or near the gene editing system binding site(s) is modified to reduce or eliminate expression of BRD9. Another example of a BRD9 inhibitor that inhibits the expression of BRD9 is a nucleic acid molecule, e.g., RNA molecule, e.g., a short hairpin RNA (shRNA) or short interfering RNA (siRNA), capable of hybridizing with BRD9 mRNA and causing a reduction or elimination of BRD9 translation. BRD9 inhibitors also include nucleic acids encoding molecules which inhibit BRD9 expression (e.g., nucleic acid encoding an anti-BRD9 shRNA or siRNA, or nucleic acid encoding one or more, e.g., all, components of an anti-BRD9 gene editing system). An example of a molecule that inhibits the function of BRD9 is a molecule, e.g., a protein or small molecule which inhibits one or more activities of BRD9. An example is a small molecule inhibitor of BRD9. Another example is a dominant negative BRD9 protein. Another example is a dominant negative version of a BRD9 binding partner. Another example is a molecule, e.g., a small molecule, which inhibits a BRD9 binding partner. BRD9 inhibitors also include nucleic acids encoding inhibitors of BRD9 function.

[0163] “Tet inhibitor” or “Tet[x] inhibitor” (e.g., “Tet1 inhibitor,” “Tet2 inhibitor”, or “Tet3 inhibitor”) as the terms are used herein, refers to a molecule, or group of molecules (e.g., a system) that reduces or eliminates the function and/or expression of the corresponding Tet, e.g., Tet1, Tet2 and/or Tet3, e.g., Tet2.

[0164] “MLL2 inhibitor” as the terms are used herein, refers to a molecule, or group of molecules (e.g., a system) that reduces or eliminates the function and/or expression of MLL2. “MLL3 inhibitor” as the terms are used herein, refers to a molecule, or group of molecules (e.g., a system) that reduces or eliminates the function and/or expression of MLL3. “MLL4 inhibitor” as the terms are used herein, refers to a molecule, or group of molecules (e.g., a system) that reduces or eliminates the function and/or expression of MLL4. “EZH2 inhibitor” as the terms are used herein, refers to a molecule, or group of molecules (e.g., a system) that reduces or eliminates the function and/or expression of EZH2.

[0165] “TRAIL inhibitor” or “TRAIL antagonist” as the terms are used herein, refers to a molecule, or group of molecules (e.g., a system) that reduces or eliminates the function and/or expression of TRAIL and/or its receptors DR5 ande/or DR4. In embodiments, a TRAIL inhibitor is a molecule that inhibits the expression of TRAIL and DR5, e.g., reduces or eliminates expression of TRAIL and/or DR5. In embodiments, the TRAIL inhibitor is a molecule that inhibits the function of TRAIL and/or DR5. An example of TRAIL inhibitor that inhibits the expression of TRAIL is a gene editing system, e.g., as described herein, that is targeted to nucleic acid within the TRAIL gene, or its regulatory elements, such that modification of the nucleic acid at or near the gene editing system binding site(s) is modified to reduce or eliminate expression of TRAIL. Another example of TRAIL inhibitor that inhibits the expression of TRAIL is a nucleic acid molecule, e.g., RNA molecule, e.g., a short hairpin RNA (shRNA) or short interfering RNA (siRNA), capable ofhybridizing with TRAIL mRNA and causing a reduction or elimination TRAIL translation. TRAIL inhibitors also include nucleic acids encoding molecules which inhibit TRAIL expression (e.g., nucleic acid encoding an anti-TRAIL, e.g., TRAIL shRNA or siRNA, or nucleic acid encoding one or more, e.g., all, components of an anti-TRAIL, e.g., TRAIL gene editing system). An example of a molecule that inhibits the function of TRAIL is a molecule, e.g., a protein or small molecule which inhibits one or more activities of TRAIL. An example is a small molecule inhibitor of TRAIL. Another example is an antibody, antibody fragment, a non-immunoglobulin binding scaffold that binds to TRAIL and/or DR5 and prevents signaling through DR5. Another example is a dominant negative TRAIL protein. Another example is a dominant negative mutant of TRAIL receptor DR5. Another example is a soluble or decoy form of TRAIL receptors DR4 (e.g., SEQ ID NO: 2441), DR5 (SEQ ID NO: 2428), DcR1 (SEQ ID NO: 2448) and DcR2 (SEQ ID NO: 2455). Another example is a mutant form of DR5 that lacks its cytoplasmic signaling domain or in which the signaling domain of DR5 is replaced by the signaling domain of a costimulatory receptor, such CD27, CD28, 41BB, GITR, BCMA, or OX40 (e.g., SEQ ID NO: 2429-2440). Additional exemplary TRAIL antagonists include DcR1 (SEQ ID NO:2360), DcR2 (SEQ ID NO: 2361) and fusion receptors containing the TRAIL-binding ectodomains of DcR1, DcR2, DR4 and DR5(SEQ ID NO: 2429-2461). Another example of a TRAIL inhibitor is a molecule, e.g., a small molecule, which inhibits a TRAIL binding partner, e.g., a TRAIL receptor, e.g., DR5. Another example of a TRAIL inhibitor is a molecule, e.g., a small molecule, which inhibits signal transduction downstream of a TRAIL receptor, e.g., DR5. An exemplary small molecule that inhibits signaling downstream of a TRAIL receptor is an NF-κB inhibitor, e.g., IKK-2 Inhibitor IV (CAS 507475-17-4), IKK2 Inhibitor VI (CAS 354811-10-2), LY2409881 or Bortezomib. Other TRAIL inhibitors, including NF-κB inhibitors, are known in the art and can be used in alternate embodiment of the disclosure. TRAIL signaling is known to activate a number of other signaling pathways, e.g., JNK pathways, and inhibitors of these pathways can be used in alternate embodiment of the disclosure to improve the efficacy and safety of immune effector cell therapies. Other examples of TRAIL inhibitor include dominant negative mutants of FADD (e.g., FADD death domain; SEQ ID NO (DNA): 2453, SEQ ID NO (PRT): 2463) and Caspase 8 (e.g., Caspase 8 D73A [SEQ ID NO (DNA): 2354, SEQ ID NO (PRT): 2464], Caspase 8 D73A/L74A; SEQ ID NO (DNA): 2355 and SEQ ID NO (PRT): 2365; Caspase 8 D73A/L74A/L75A; SEQ ID NO (DNA): 2356 and SEQ ID NO (PRT): 2366. TRAIL inhibitors also include nucleic acids encoding inhibitors of TRAIL function, e.g., binding of TRAIL to its receptor, e.g., DR5 and/or signal transduction downstream of a TRAIL receptor. TRAIL inhibitors also include nucleic acids encoding molecules which inhibit TRAIL signaling (e.g., nucleic acid encoding an anti-FADD or anti-Caspase 8, e.g., FADD shRNA or siRNA, or Caspase 8 shRNA or siRNA or nucleic acid encoding one or more, e.g., all, components of an anti-FADD or Caspase 8, e.g., FADD gene editing system or Caspase 8 gene editing system).

[0166] The inhibitor/antagonists of other molecules of the disclosure can be described similarly.

[0167] A “system” as the term is used herein in connection with gene editing refers to a group of molecules, e.g., one or more molecules, which together act to effect a desired function.

[0168] A “gene editing system” as the term is used herein, refers to a system, e.g., one or more molecules that direct and effect an alteration, e.g., a deletion, of one or more nucleic acids at or near a site of genomic DNA targeted by said system. Gene editing systems are known in the art, and are described more fully below.

[0169] “Binding partner” as the term is used herein in the context of a “X”, e.g., Tet1, Tet2 and/or Tet3, e.g., Tet2 binding partner, refers to a molecule, e.g., a protein, which interacts, e.g., binds to “X”, e.g., Tet, e.g., Tet1, Tet2 and/or Tet3, e.g., Tet2 protein. Without being bound by theory, it is believed that Tet, e.g., Tet1, Tet2 and/or Tet3, e.g., Tet2 binds to one or more HDAC proteins. Such HDAC proteins are considered examples of Tet, e.g., Tet1, Tet2 and/or Tet3, e.g., Tet2 binding partners. Binding partners of other proteins of the disclosure are known in the art.

[0170] A “dominant negative” gene product or protein is one that interferes with the function of another gene product or protein. In one embodiment, a dominant negative DR5 is a mutant of DR5 that is incapable of transmitting a signal, e.g., a death inducing signal.

[0171] Manufacturing cell therapy products (e.g., CAR-T or TCR-T or cellular vaccines) genrerally begins with the collection of lymphocytes from a subject via leukapheresis and T-cell selection, followed by activation, modification, expansion and cryopreservation of the final product. While this process has worked well in proof-of-concept clinical trials, several challenges exist that impede the scaling-up and scaling-out of viable cellular therapies. The term “subject” is intended to include living organisms in which an immune response can be elicited (e.g., mammals). Examples of subjects include humans, monkeys, chimpanzees, dogs, cats, mice, rats, and transgenic species thereof. T cells can be obtained from a number of sources, including peripheral blood mononuclear cells, bone marrow, lymph node tissue, cord blood, tissue resident lymphocytes, tumor-resident lymphocytes, thymus tissue, tissue from a site of infection, ascites, pleural effusion, spleen tissue, and tumors.

[0172] The disclosure relates to a method of improving the the yield, expansion, activation, proliferation, expansion, diversity, tissue (e.g., tumor) penetrance, persistence, efficacy and safety of cell therapy products, e.g., immune cell therapy products, e.g., CAR-T, SIR-T, TFP-T, Ab-TCR-T and TCR-T products etc. In one embodiment, the disclosure related to improving the yield, expansion, activation, proliferation, expansion, diversity, tissue (e.g., tumor) penetrance, persistence and efficacy of immune cell therapies, such as engineered CAR-T, TCR-T, SIR-T, Ab-TCR-T cell therapies or NK cell therapies, by using mobilized immune cells for the manufacturing of cell therapy products. In various embodiments, the cells (e.g., immune cells, e.g., T cells or NK cells or macrophage/monocytes or dendritic cells) are mobilized by administrating to the donor from whom the cells are harvested a CXCR antagonist (e.g., Mozibil or Plerixafor), a cytokine (e.g., G-CSF, GM-CSF or sargramostim, Neulasta or Pegfilgastrim), a beta2 adrenergic agonist (e.g., epinephrine), a tyrosine kinase inhibitor (e.g., dasatinib), chemotherapy drug(s) (e.g., cyclophosphamide, doxorubicin) or a combination of the above agents prior to the collection of cells (e.g., immune cells, e.g., T cells or NK cells). In various embodiments, the cells (e.g., immune cells, e.g., T cells or NK cells or macrophage/monocytes or dendritic cells) are mobilized by making the subject (i.e. donor) exercise.

[0173] In one aspect, the mobilized cells (e.g., immune cells, e.g., T cells or NK cells) are obtained from the subject using leukapheresis. In one aspect, the mobilized cells (e.g., immune cells, e.g., T cells or NK cells) are obtained from the subject using bone marrow harvest.

[0174] In one aspect, the mobilized cells (e.g., immune cells, e.g., T cells or NK cells) are obtained from a subject who is candidate for receiving the cell therapy product.

[0175] In one aspect, the cells (e.g., immune cells, e.g., T cells or NK cells) are obtained from a subject who is a healthy donor. In one aspect, the mobilized cells (e.g., immune cells, e.g., T cells or NK cells) are obtained from a subject who has a disease (e.g., a cancer, infection or auto-immune disease).

[0176] In one aspect, the mobilized cells (e.g., immune cells, e.g., T cells or NK cells) are obtained from a subject who has received prior chemotherapy, e.g., anti-cancer drugs. In one aspect, the mobilized cells (e.g., immune cells, e.g., T cells or NK cells) are obtained from a subject who has insufficient number of circulating (e.g., immune cells, e.g., T cells or NK cells or macrophage/monocytes or dendritic cells) cells prior to administration of the mobilizing agent.

[0177] In one aspect, the mobilized cells (e.g., immune cells, e.g., T cells or NK cells) are obtained from a subject who has less than about 1000×10⁶/L (e.g., less than 600×10⁶/L, 400×10⁶/L, 200×10⁶/L or 100×10⁶/L) CD3+ cells in peripheral blood prior to the administration of the mobilizing agent. In one aspect, the mobilized cells (e.g., immune cells, e.g., T cells or NK cells) are obtained from a subject who has less than about 800×10⁶/L (e.g., less than 400×10⁶/L, 200×10⁶/L, 100×10⁶/L, 50×10⁶/L) CD4+ cells in peripheral blood prior to the administration of the mobilizing agent.

[0178] In one aspect, the mobilized cells (e.g., immune cells, e.g., T cells or NK cells) are obtained from a subject who has less than about 500×10⁶/L (e.g., less than 400×10⁶/L, 200×10⁶/L, 100×10⁶/L, or 50×10⁶/L) CD8+ cells in peripheral blood prior to the administration of the mobilizing agent. In one aspect, the mobilized cells (e.g., immune cells, e.g., T cells or NK cells) are obtained from a subject who has less than about 50×10⁶/L (e.g., less than 40×10⁶/L, 20×10⁶/L, 10×10⁶/L, or 5×10⁶/L) CD3+/CD16+ cells in peripheral blood prior to the administration of the mobilizing agent.

[0179] In one aspect, the mobilized cells (e.g., immune cells, e.g., T cells or NK cells) are obtained from a subject who has less than about 50×10⁶/L (e.g., less than 40×10⁶/L, 20×10⁶/L, 10×10⁶/L, or 5×10⁶/L) CD3+/CD56+ cells in peripheral blood prior to the administration of the mobilizing agent. In one aspect, the mobilized cells (e.g., immune cells, e.g., T cells or NK cells) are obtained from a subject who has poor quality of peripheral blood cells (e.g., immune cells, e.g., T cells or NK cells etc.) prior to administration of the mobilizing agent.

[0180] In one aspect, the mobilized cells (e.g., immune cells, e.g., T cells or NK cells) are obtained from a subject who has poor diversity of peripheral blood cells (e.g., immune cells, e.g., T cells or NK cells) prior to administration of the mobilizing agent.

[0181] In one aspect, the mobilized cells (e.g., immune cells, e.g., T cells or NK cells) are obtained from a subject who has poor polyfuncationality (e.g., antigen induced production of IL2, TNFα and IFNγ etc.) of peripheral blood cells (e.g., immune cells, e.g., T cells or NK cells) prior to administration of the mobilizing agent.

[0182] In one aspect, the mobilized cells (e.g., immune cells, e.g., T cells or NK cells) are obtained from a subject who has or is expected to have a poor yield of leukapheresed product without the administration of the mobilizing agent. In one aspect, the mobilized cells (e.g., immune cells, e.g., T cells or NK cells) are obtained from a subject who has or is expected to have less than about 50×10⁹ (e.g., less than 40×10⁹, 20×10⁹, 10×10⁹ etc.) white blood cells (WBC) in the leukapheresed product without the administration of the mobilizing agent.

[0183] In one embodiment, the method involves obtaining cells (e.g., immune cells, e.g., T cells or NK cells) for the manufacturing and use of a cellular therapy product from a subject (i.e. an autologous or an allogeneic donor) who has received a mobilizing agent, (e.g., a CXCR4 antagonist, e.g., Plerixafor) prior to the collection of cells.

[0184] In a further aspect of the disclosure, the method involves obtaining cells (e.g., immune cells, e.g., T cells or NK cells) for the manufacturing and use of a cellular therapy product from a subject (i.e. an autologous or an allogeneic donor) who has received a mobilizing agent, (e.g., a CXCR4 antagonist, e.g., Plerixafor) to aid in mobilization of immune cells (e.g., T cells) into peripheral circulation.

[0185] In further aspect of the disclosure, the method involves obtaining cells (e.g., immune cells, e.g., T cells or NK cells) for the manufacturing and use of a cellular therapy product from a subject (i.e. an autologous or an allogeneic donor) who has received a mobilizing agent, (e.g., a CXCR4 antagonist, e.g., Plerixafor) to aid in mobilization of specific subset of immune cells into peripheral circulation.

[0186] In one aspect, the cells (e.g., immune cells, e.g., T cells or NK cells) that have been mobilized by a mobilizing agent (e.g., a CXCR4 antagonist, e.g., Plerixafor) are obtained from a subject who is candidate for receiving the cell therapy product. In one aspect, the cells (e.g., immune cells, e.g., T cells or NK cells) that have been mobilized by a mobilizing agent (e.g., a CXCR4 antagonist, e.g., Plerixafor) are obtained from a subject who is a healthy donor. In one aspect, the cells (e.g., immune cells, e.g., T cells or NK cells) that have been mobilized by a mobilizing agent (e.g., a CXCR4 antagonist, e.g., Plerixafor) are obtained from a subject who has a disease (e.g., a cancer, infection or auto-immune disease).

[0187] In one aspect, the cells (e.g., immune cells, e.g., T cells or NK cells) that have been mobilized by a mobilizing agent (e.g., a CXCR4 antagonist, e.g., Plerixafor) are obtained from a subject who has previously received treatment for a disease (e.g., cancer, immune or infection disease). In one aspect, the cells (e.g., immune cells, e.g., T cells or NK cells) that have been mobilized by a mobilizing agent (e.g., a CXCR4 antagonist, e.g., Plerixafor) are obtained from a subject who has previously received treatment for a cancer.

[0188] In one aspect, the cells (e.g., immune cells, e.g., T cells or NK cells) that have been mobilized by a mobilizing agent (e.g., a CXCR4 antagonist, e.g., Plerixafor) are obtained from a subject who has previously received treatment for a blood cancer (e.g., plasma cell disorder, myeloma, lymphoma, acute lymphocytic leukemia, chronic lymphocytic leukemia, MDS etc.). In one aspect, the cells (e.g., immune cells, e.g., T cells or NK cells) that have been mobilized by a mobilizing agent (e.g., a CXCR4 antagonist, e.g., Plerixafor) are obtained from a subject who has previously received treatment for a solid tumor (e.g., lung cancer, breast cancer, gastrointestinal cancer, liver cancer etc.). In one aspect, the cells (e.g., immune cells, e.g., T cells or NK cells) that have been mobilized by a mobilizing agent (e.g., a CXCR4 antagonist, e.g., Plerixafor) are obtained from a subject who has previously received treatment for an immune disorder. In one aspect, the cells (e.g., immune cells, e.g., T cells or NK cells) that have been mobilized by a mobilizing agent (e.g., a CXCR4 antagonist, e.g., Plerixafor) are obtained from a subject who has previously received treatment for an infection (e.g., HIV-1/AIDS).

[0189] In one aspect, the cells (e.g., immune cells, e.g., T cells or NK cells) that have been mobilized by a mobilizing agent (e.g., a CXCR4 antagonist, e.g., Plerixafor) are obtained from a subject who has previously received a chemotherapy drug, e.g., an anti-cancer drug, e.g., alkylating agent, e.g., melphalan, cyclophosphamide etc. Other anticancer drugs are known in the art and include etoposide, doxorubicin, ARA-C, fludarabine, vincristine, vinblastine etc. In one aspect, the cells (e.g., immune cells, e.g., T cells or NK cells) that have been mobilized by a mobilizing agent (e.g., a CXCR4 antagonist, e.g., Plerixafor) are obtained from a subject who has previously received an immune modulatory drug (IMiDs; e.g., lenalidomide). In one aspect, the cells (e.g., immune cells, e.g., T cells or NK cells) that have been mobilized by a mobilizing agent (e.g., a CXCR4 antagonist, e.g., Plerixafor) are obtained from a subject who has previously received a steroid (e.g., dexamethasone). In one aspect, the cells (e.g., immune cells, e.g., T cells or NK cells) that have been mobilized by a mobilizing agent (e.g., a CXCR4 antagonist, e.g., Plerixafor) are obtained from a subject who has previously received an antibody (e.g., rituximab, CAMPATH etc). In one aspect, the cells (e.g., immune cells, e.g., T cells or NK cells) that have been mobilized by a mobilizing agent (e.g., a CXCR4 antagonist, e.g., Plerixafor) are obtained from a subject who has previously received an antibody drug conjugate (e.g., ADCETRIS). In one aspect, the cells (e.g., immune cells, e.g., T cells or NK cells) that have been mobilized by a mobilizing agent (e.g., a CXCR4 antagonist, e.g., Plerixafor) are obtained from a subject who has previously received a bispecific antibody (e.g., Blinatumomab). In one aspect, the cells (e.g., immune cells, e.g., T cells or NK cells) that have been mobilized by a mobilizing agent (e.g., a CXCR4 antagonist, e.g., Plerixafor) are obtained from a subject who has previously received a targeted therapy (e.g. a tyrosine kinase inhibitor, e.g., Ibrutinib). In one aspect, the cells (e.g., immune cells, e.g., T cells or NK cells) that have been mobilized by a mobilizing agent (e.g., a CXCR4 antagonist, e.g., Plerixafor) are obtained from a subject who has previously received radiation therapy. In one aspect, the cells (e.g., immune cells, e.g., T cells or NK cells) that have been mobilized by a mobilizing agent (e.g., a CXCR4 antagonist, e.g., Plerixafor) are obtained from a subject who has previously received a radiolabeled antibody.

[0190] In one aspect, the cells (e.g., immune cells, e.g., T cells or NK cells) that have been mobilized by a mobilizing agent (e.g., a CXCR4 antagonist, e.g., Plerixafor) are obtained from a subject who has insufficient number of circulating cells (e.g., immune cells, e.g., T cells or NK cells) prior to administration of the mobilizing agent. In one aspect, the CXCR4 antagonist-mobilized cells (e.g., immune cells, e.g., T cells or NK cells) are obtained from a subject who has less than about 1000×10⁶/L (e.g., less than 600×10⁶/L, 400×10⁶/L, 200×10⁶/L or 100×10⁶/L) CD3+ cells in peripheral blood prior to the administration of the mobilizing agent. In one aspect, the CXCR4 antagonist-mobilized cells (e.g., immune cells, e.g., T cells or NK cells) are obtained from a subject who has less than about 800×10⁶/L (e.g., less than 400×10⁶/L, 200×10⁶/L, 100×10⁶/L, 50×10⁶/L) CD4+ cells in peripheral blood prior to the administration of the mobilizing agent. In one aspect, the CXCR4 antagonist-mobilized cells (e.g., immune cells, e.g., T cells or NK cells) are obtained from a subject who has less than about 500×10⁶/L (e.g., less than 400×10⁶/L, 200×10⁶/L, 100×10⁶/L, or 50×10⁶/L) CD8+ cells in peripheral blood prior to the administration of the mobilizing agent. In one aspect, the CXCR4 antagonist-mobilized cells (e.g., immune cells, e.g., T cells or NK cells) are obtained from a subject who has less than about 50×10⁶/L (e.g., less than 40×10⁶/L, 20×10⁶/L, 10×10⁶/L, or 5×10⁶/L) CD3+/CD16+ cells in peripheral blood prior to the administration of the mobilizing agent. In one aspect, the CXCR4 antagonist-mobilized cells (e.g., immune cells, e.g., T cells or NK cells) are obtained from a subject who has less than about 50×10⁶/L (e.g., less than 40×10⁶/L, 20×10⁶/L, 10×10⁶/L, or 5×10⁶/L) CD3+/CD56+ cells in peripheral blood prior to the administration of the mobilizing agent. In one aspect, the CXCR4 antagonist-mobilized cells (e.g., immune cells, e.g., T cells or NK cells) are obtained from a subject who has poor quality of peripheral blood cells (e.g., immune cells, e.g., T cells or NK cells etc.) prior to administration of the mobilizing agent. In one aspect, the CXCR4 antagonist-mobilized cells (e.g., immune cells, e.g., T cells or NK cells) are obtained from a subject who has poor diversity of peripheral blood cells (e.g., immune cells, e.g., T cells or NK cells) prior to administration of the mobilizing agent. Diversity of blood cells can be measured using measurement of clonality by next generation sequencing and/or by multicolor flow cytometry.

[0191] In one aspect, the CXCR4 antagonist-mobilized cells (e.g., immune cells, e.g., T cells or NK cells) are obtained from a subject who has poor polyfuncationality (e.g., antigen induced production of IL2, TNFα and IFNγ etc.) of peripheral blood cells (e.g., immune cells, e.g., T cells or NK cells) prior to administration of the mobilizing agent.

[0192] In one aspect, the CXCR4 antagonist-mobilized cells (e.g., immune cells, e.g., T cells or NK cells) are obtained from a subject who has or is expected to have a poor yield of leukapheresed product without the administration of the mobilizing agent. In one aspect, the CXCR4 antagonist-mobilized cells (e.g., immune cells, e.g., T cells or NK cells) are obtained from a subject who has or is expected to have less than about 50×10⁹ (e.g., less than 40×10⁹, 20×10⁹, 10×10⁹ etc.) white blood cells (WBC) in the leukapheresed product without the administration of the mobilizing agent.

[0193] In an embodiment, a CXCR4 antagonist is administered to the subject (i.e., donor) at a dose of 0.24 mg/kg subcutaneosly daily prior to and optionally on the day of collection (e.g., leukapheresis) of cells. In some embodiments, a CXCR4 antagnoist is administered to the subject (i.e., donor) at a dose of about 0.20 mg/kg to 5 mg/kg (e.g., 0.01 mg/kg/, 0.05 mg/kg, 0.1 mg/kg, 0.15 mg/kg, 0.2 mg/kg, 0.25 mg/kg, 0.3 mg/kg, 0.4 mg/kg, 0.5 mg/kg, 0.75 mg/kg, 1 mg/kg, 2 mg/kg or 5 mg/kg), e.g., subcutaneously prior to and optionally on the day of collection of the cells. In some embodiments, a CXCR4 antagnoist is administered to the subject (i.e., donor) via alternate routes of administration (e.g., intravenous, intramuscular, intraperiotenal, transdermal, and oral etc). In some embodiments, a CXCR4 antagnoist is administered to the subject (i.e., donor) daily for about 1 to 10 days (e.g, 1 day, 2 days, 3 days, 4 days, 5 days, 6 days, 7 days, 10 days) prior to collection of the cells. In some embodiments, the cells (e.g, immune cells) are collected from the subject (i.e., donor) between about 15 min to 96 h (e.g., 15 min, 2 h, 6 h, 12 h, 24 h, 36 h, or 48 h) after the administration of the last dose of a CXCR4 antagnoist.

[0194] In an embodiment, the CXCR4 antagonist is Mozibil or Plerixafor. In an embodiment, Perixafor is administered to the subject (i.e., donor) at a dose of 0.24 mg/kg subcutaneosly daily prior to and optinoally on the day of collection (e.g., leukapheresis) of cells. In some embodiments, Perixafor is administered to the subject (i.e., donor) at a dose of about 0.20 mg/kg to 5 mg/kg (e.g., 0.01 mg/kg/, 0.05 mg/kg, 0.1 mg/kg, 0.15 mg/kg, 0.2 mg/kg, 0.25 mg/kg, 0.3 mg/kg, 0.4 mg/kg, 0.5 mg/kg, 0.75 mg/kg, 1 mg/kg, 2 mg/kg or 5 mg/kg), e.g., subcutaneously prior to and optionally on the day of collection of the cells. In some embodiments, Perixafor is administered to the subject (i.e., donor) at a dose of about 0.20 mg/kg to 5 mg/kg (e.g., 0.01 mg/kg, 0.05 mg/kg, 0.1 mg/kg, 0.15 mg/kg, 0.2 mg/kg, 0.25 mg/kg, 0.3 mg/kg, 0.4 mg/kg, 0.5 mg/kg, 0.75 mg/kg, 1 mg/kg, 2 mg/kg or 5 mg/kg), e.g., intravenously prior to and optionally on the day of collection of cells. In some embodiments, Perixafor is administered to the subject (i.e., donor) at a dose of about 0.20 mg/kg to 5 mg/kg (e.g., 0.01 mg/kg, 0.05 mg/kg, 0.1 mg/kg, 0.15 mg/kg, 0.2 mg/kg, 0.25 mg/kg, 0.3 mg/kg, 0.4 mg/kg, 0.5 mg/kg, 0.75 mg/kg, 1 mg/kg, 2 mg/kg or 5 mg/kg), e.g., intramuscularly prior to and optionally on the day of collection of cells. In some embodiments, Perixafor is administered to the subject (i.e., donor) daily for about 1 to 10 days (e.g, 1 day, 2 days, 3 days, 4 days, 5 days, 6 days, 7 days, 10 days) prior to collection of the cells. In some embodiments, the cells (e.g, immune cells) are collected from the subject (i.e., donor) between about 15 min to 96 h (e.g., 15 min, 1 h, 2 h, 6 h, 12 h, 24 h, 36 h, 48 h, or 96 h) after the administration of the last dose of Perixafor.

[0195] In further embodiments, the CXCR4 antagonist is BMS-936564/MDX-1338, LY2510924, 1,1′-[1,4-phenylenebis(methylene)]bis [1,4,8,11-tetraazacyclotetradecane] (AMD3100; Plerixafor), N, N-dipropyl-N-[4-({[(1H-imidazol-2-yl)methyl)benzyl][(1-methyl-1H-imidazol-2-yl) methyl]amino]methyl)benzyl]-N-methylbutane-1, 4-diamine tri(2R, 3R)-tartrate (KRH-3955), ([5-(4-methyl-1-piperazinyl)-2-({methyl[(8S)-5,6,7,8-tetrahydro-8-quinolinyl]amino}methyl)imidazo[1,2-a]pyridin-3-yl]methanol) (GSK812397), or N-(1H-benzimidazol-2-ylmethyl)-N′-(5,6,7,8-tetrahydroquinolin-8-yl)butane-1,4-diamine (AMD11070). In an embodiment, a CXCR4 antagonist is BL-8040. Additional CXCR4 antagonists are known in the art, such as T140 analogs, NUCC-388 and CXCR4 Antagonist III (calbiochem), and can be used in alternate embodiments of the disclosure.

[0196] In further embodiments, the CXCR4 antagonist, is a CXCL12 antagonist. In further preferred embodiments, the CXCL12 antagonist is an anti-CXCL12 antibody. One example of an anti-CXCL12 antibody includes, but is not limited to an anti-SDF-1 antibody. Examples of such a CXCL12 antagonist, can be, but are not limited to RNA oligonucleotide NOX-A12 or Tannic acid or any other chemical that blocks the interaction of CXCL12 with CXCR4.

[0197] A CXCR4 antagonist as described herein may be administered by continuous intravenous infusion in an amount sufficient to maintain the serum concentration at a level that yields >90% inhibition of CXCL12 binding by CXCR4 (see for example Hendrix et al J Acquir Immune Defic Syndr. 2004 Oct. 1; 37(2):1253-62). Other CXCR4 signal inhibitors described herein can also be used in this same manner.

[0198] Administration in vivo can be effected in one dose, continuously or intermittently (e.g., in divided doses at appropriate intervals). Methods of determining the most effective means and dosage of administration are well known to those of skill in the art and will vary with the formulation used for therapy, the purpose of the therapy, the target cell being treated, and the subject being treated. Single or multiple administrations can be carried out with the dose level and pattern being selected by the physician. For example, the dose and duration of treatment with a CXCR4 antagonist and other mobilizing agents of the disclosure can adjusted by the physician based on peripheral blood lymphocyte count.

[0199] In a further aspect of the disclosure, cells (e.g., immune cells, e.g., T cells or NK cells) are obtained by leukophersis from a subject (i.e. an autologous or an allogeneic donor) who has received a cytokine to aid in mobilization of specific subset of immune cells into peripheral circulation. In one embodiment, the cytokine is G-CSF (filgrastim, Amgen). In some embodiments, G-CSF is administered at a dose of about 1-30 μg/kg (e.g., 1 μg/kg, 2 μg/kg, 5 μg/kg, 10 μg/kg or 30 μg/kg) subcutaneously daily for about 1-10 days. In some embodiments, G-CSF is administered at a dose of about 1-30 μg/kg (e.g., 1 μg/kg, 2 μg/kg, 5 μg/kg, or 30 μg/kg) intravenously daily for about 1-10 days. In some embodiments, the cells (e.g., immune cells, e.g., T cells or NK cells) are collected from the subject (i.e., donor) between about 2 h to 96 h after the administration of the last dose of G-CSF.

[0200] In a further aspect of the disclosure, cells (e.g., immune cells, e.g., T cells or NK cells) are obtained by leukophersis from a subject (i.e. an autologous or an allogeneic donor) who has received a cytokine to aid in mobilization of specific subset of cells (e.g., immune cells, e.g., T cells or NK cells) into peripheral circulation. In one embodiment, the cytokine is Pegfilgrastim (Neulasta, Amgen). In some embodiments, Pegfilgrastim is administered at a dose of about 6 mg (e.g., 6 mg, 8 mg, 10 mg, 12 mg, or 16 mg) by subcutaneous injection. In some embodiments, the cells (e.g., immune cells, e.g., T cells or NK cells) are collected from the subject (i.e., donor) between about 4 dyas after the administration of dose of Pegfilgrastim.

[0201] In a further aspect of the disclosure, cells (e.g., immune cells, e.g., T cells or NK cells) are obtained by leukophersis from a subject (i.e. an autologous or an allogeneic donor) who has received GM-CSF to aid in mobilization of specific subset of cells (e.g., immune cells, e.g., T cells or NK cells) into peripheral circulation. In some embodiments, GM-CSF (Leukine) is administered at a dose of about 250 μg/m²/day IV over 24 hr or subcutaneously daily for about 1-10 days. In some embodiments, the cells (e.g., immune cells, e.g., T cells or NK cells) are collected from the subject (i.e., donor) between about 2 h to 96 h after the administration of the last dose of GM-CSF.

[0202] In a further aspect of the disclosure, cells (e.g., immune cells, e.g., T cells or NK cells) are obtained by leukophersis from a subject (i.e. a donor) who has received a combination of a CXCR4 antagonist (e.g, Perixafor) and a cytokine (e.g., G-CSF, GM-CSF or Pegfilgrastim) to aid in mobilization of specific subset of cells (e.g., immune cells, e.g., T cells or NK cells) into peripheral circulation. In an exemplary embodiment, the subject receives G-CSF at dose of 10 μg/kg subcutaneously daily for 5 days followed by Perixafor at dose of 0.25 mg/kg subcutanelously on day 5. Leukapheresis products are collected approximately 2 hours after the dose of Perixafor using a CS3000-Plus blood cell separator (Baxter Healthcare). In an exemplary embodiment, the subject receives a dose of Pegfilgastrim at a dose of 12 mg by subcutaneous injection followed 4 days later by Perixafor at dose of 0.25 mg/kg subcutanelously. Leukapheresis products are collected approximately 2 hours after the dose of Perixafor using a CS3000-Plus blood cell separator (Baxter Healthcare) and used for manufacturing of cell therapy product (e.g., generation of CAR-T cells).

[0203] In a further aspect of the disclosure, cells (e.g., immune cells, e.g., T cells or NK cells) are obtained by leukophersis from a subject (i.e. a donor) after chemo-mobilization, e.g., from a subject who has received chemotherapy followed by, during the recovery of counts from chemotherapy, a CXCR4 antagonist (e.g, Perixafor) and/or a cytokine (e.g., G-CSF or GM-CSF) to aid in mobilization of specific subset of cells (e.g., immune cells, e.g., T cells or NK cells) into peripheral circulation. A number of chemo-mobilization regimens are known in the art and can be used in the methods of the disclosure. Exemplary chemo-mobilization regimens include high-dose cyclophosphamide (HDC, 4 gm/m²) or cyclophosphamide (4 gm/m²) plus etoposide (600 mg/m²) (HDCE).

[0204] In a further aspect of the disclosure, cells (e.g., immune cells, e.g., T cells or NK cells) are obtained by leukophersis from a subject (i.e. a donor) who has received a beta2 adrenergic receptor agonist to aid in mobilization of specific subset of cells (e.g., immune cells, e.g., T cells or NK cells) into peripheral circulation. In an exemplary embodiment, the beta2 adrenergic agonist is epinephrine. In an exemplary embodiment, the subject receives epinephrine by intravenous infusion at a dose of about 0.005 mg/kg/min to 0.02 mg/kg/min for about 30 minutes to 2 hours. Leukapheresis products are collected after 30 min to 2 hr of epinephrine infusion.

[0205] In a further aspect of the disclosure, cells (e.g., immune cells, e.g., T cells or NK cells) are obtained by leukophersis from a subject (i.e. a donor) following exercise. In an exemplary embodiment, the subject carries out moderate to severe exercise on a treadmill for about 10 minutes to 1 hours and leukapheresis products are collected after 10 min to 1 hr of moderate to severe exerceise. In an exemplary embodiment, the cells (e.g., immune cells, e.g., T cells or NK cells) are obtained by leukophersis from a subject (i.e. a donor) following exercise that results in heart rate that is more than 50-100% higher than the heart rate at rest.

[0206] In a further aspect of the disclosure, cells (e.g., immune cells, e.g., T cells or NK cells) are obtained by leukophersis from a subject (i.e. a donor) after a dose of Src kinase inhibitor. An exemplary Src kinase inhibitor is Dasatinb. In an exemplary embodiment, the subject receives Dasatinb at a dose of about 40-140 mg orally and the cells (e.g., immune cells, e.g., T cells or NK cells) are obtained by leukophersis from the subject between about 1-5 hour after the dose of Dasatinib. In an embodiment, Dasatinib is administered to the subject for about 7 days (e.g., 6 days, 4 days, 2 days etc.) prior to leukapheresis.

[0207] In one embodiment, the immune effector cells are obtained from a subject that has received a low, immune enhancing dose of an mTOR inhibitor. In an embodiment, the population of immune effector cells, e.g., T cells, to be engineered to express a CAR/TCR, are harvested after a sufficient time, or after sufficient dosing of the low, immune enhancing, dose of an mTOR inhibitor, such that the level of PD1 negative immune effector cells, e.g., T cells, or the ratio of PD1 negative immune effector cells, e.g., T cells/PDl positive immune effector cells, e.g., T cells, in the subject or harvested from the subject has been, at least transiently, increased.

[0208] The mobilized cells (e.g., immune cells, e.g., T cells or NK cells) of the disclosure can be used for a number of cell therapy applications. In an embodiment, the mobilized cells are administered to a subject without manipulation or genetic modifications. In an embodiment, T regulatory cells (CD3+, CD4+, CD25^{high}, CD127^{low}, FoxP3+) are removed from the mobilized cells by depletion of CD25-positive T cells. In an embodiment, the mobilized cells are depleted of regulatory T cells (TREGs) by removal of CD25^{hi}-expressing T cells using methods known in the art, such as immunomagnetic labeling with CD25 antibody labeled magnetic beads and magnet assisted cell sorting.

[0209] In an embodiment, the mobilized cells, with or without the removal of TREGs, are genetically modified prior to administration to a subject. In an embodiment, the mobilized cells (e.g., immune cells, e.g., T cells or NK cells or macrophage/monocytes or dendritic cells) are genetically modified to express a natural or a non-natural (e.g., synthetic) immune receptor. Exemplary immune receptors that can be expressed in the mobilized cells of the disclosure include a natural TCR, a recombinant TCR, a chimeric antigen receptor (CAR), including next generation CAR (e.g., SIR, TFP, Ab-TCR, SuperCAR, TAC etc), a synthetic notch receptor and the like. In an embodiment, the mobilized cells, with or without the removal of TREGs, are used for generation of a cellular vaccine.

[0210] In an embodiment, the mobilized cells are genetically modified to express an immune receptor that recognizes one or more of antigens selected from the group of CD5, CD19; CD123; CD22; CD30; CD171; CS1 (also referred to as CD2 subset 1, CRACC, SLAMF7, CD319, and 19A24); C-type lectin-like molecule-1 (CLL-1 or CLECL1); CD33; epidermal growth factor receptor variant III (EGFRviii); ganglioside G2 (GD2); ganglioside GD3 (aNeu5Ac(2-8)aNeu5Ac(2-3)bDGalp(1-4)bDGlcp(1-1)Cer); TNF receptor family member B cell maturation (BCMA); Tn antigen ((Tn Ag) or (GalNAcα-Ser/Thr)); prostate-specific membrane antigen (PSMA); Receptor tyrosine kinase-like orphan receptor 1 (ROR1); Fins Like Tyrosine Kinase 3 (FLT3); Tumor-associated glycoprotein 72 (TAG72); CD38; CD44v6; a glycosylated CD43 epitope expressed on acute leukemia or lymphoma but not on hematopoietic progenitors, a glycosylated CD43 epitope expressed on non-hematopoietic cancers, Carcinoembryonic antigen (CEA); Epithelial cell adhesion molecule (EPCAM); B7H3 (CD276); KIT (CD117); Interleukin-13 receptor subunit alpha-2 (IL-13Ra2 or CD213A2); Mesothelin; Interleukin 11 receptor alpha (IL-11Ra); prostate stem cell antigen (PSCA); Protease Serine 21 (Testisin or PRSS21); vascular endothelial growth factor receptor 2 (VEGFR2); Lewis(Y) antigen; CD24; Platelet-derived growth factor receptor beta (PDGFR-beta); Stage-specific embryonic antigen-4 (SSEA-4); CD20/MS4A1; Folate receptor alpha (FRa or FRI); Folate receptor beta (FRb); Receptor tyrosine-protein kinase ERBB2 (Her2/neu); Mucin 1, cell surface associated (MUC1); epidermal growth factor receptor (EGFR); neural cell adhesion molecule (NCAM); Prostase; prostatic acid phosphatase (PAP); elongation factor 2 mutated (ELF2M); Ephrin B2; fibroblast activation protein alpha (FAP); insulin-like growth factor 1 receptor (IGF-I receptor), carbonic anhydrase IX (CA1X); Proteasome (Prosome, Macropain) Subunit, Beta Type, 9 (LMP2); glycoprotein 100 (gp100); oncogene fusion protein consisting of breakpoint cluster region (BCR) and Abelson murine leukemia viral oncogene homolog 1 (Abl) (bcr-abl); tyrosinase; ephrin type-A receptor 2 (EphA2); sialyl Lewis adhesion molecule (sLe); ganglioside GM3 (aNeu5Ac(2-3)bDClalp(1-4)bDGlcp(1-1)Cer); transglutaminase 5 (TGS5); high molecular weight-melanoma associated antigen (HMWMAA); o-acetyl-GD2 ganglioside (OAcGD2); tumor endothelial marker 1 (TEM1/CD248); tumor endothelial marker 7-related (TEM7R); claudin 6 (CLDN6); thyroid stimulating hormone receptor (TSHR); G protein coupled receptor class C group 5, member D (GPRC5D); chromosome X open reading frame 61 (CXORF61); CD97; CD179a; anaplastic lymphoma kinase (ALK); Polysialic acid; placenta-specific 1 (PLAC1); hexasaccharide portion of globoH glycoceramide (GloboH); mammary gland differentiation antigen (NY-BR-1); uroplakin 2 (UPK2); Hepatitis A virus cellular receptor 1 (HAVCR1); adrenoceptor beta 3 (ADRB3); pannexin 3 (PANX3); G protein-coupled receptor 20 (GPR20); lymphocyte antigen 6 complex, locus K 9 (LY6K); Olfactory receptor 51E2 (OR51E2); TCR Gamma Alternate Reading Frame Protein (TARP); Wilms tumor protein (WT1); Cancer/testis antigen 1 (NY-ESO-1); Cancer/testis antigen 2 (LAGE-1a); Melanoma-associated antigen 1 (MAGE-A1); ETS translocation-variant gene 6, located on chromosome 12p (ETV6-AML); sperm protein 17 (SPA17); X Antigen Family, Member 1A (XAGE1); angiopoietin-binding cell surface receptor 2 (Tie 2); melanoma cancer testis antigen-1 (MAD-CT-1); melanoma cancer testis antigen-2 (MAD-CT-2); Fos-related antigen 1; tumor protein p53 (p53); p53 mutant; prostein; survivin; telomerase; prostate carcinoma tumor antigen-1 (PCT A-1 or Galectin 8), melanoma antigen recognized by T cells 1 (MelanA or MARTI); Rat sarcoma (Ras) mutant; human Telomerase reverse transcriptase (hTERT); sarcoma translocation breakpoints; melanoma inhibitor of apoptosis (ML-IAP); ERG (transmembrane protease, serine 2 (TMPRSS2) ETS fusion gene); N-Acetyl glucosaminyl-transferase V (NA17); paired box protein Pax-3 (PAX3); Androgen receptor; Cyclin B1; v-myc avian myelocytomatosis viral oncogene neuroblastoma derived homolog (MYCN); Ras Homolog Family Member C (RhoC); Tyrosinase-related protein 2 (TRP-2); Cytochrome P450 1B 1 (CYP1B 1); CCCTC-Binding Factor (Zinc Finger Protein)-Like (BORIS or Brother of the Regulator ofimprinted Sites), Squamous Cell Carcinoma Antigen Recognized By T Cells 3 (SART3); Paired box protein Pax-5 (PAX5); proacrosin binding protein sp32 (OY-TES1); lymphocyte-specific protein tyrosine kinase (LCK); A kinase anchor protein 4 (AKAP-4); synovial sarcoma, X breakpoint 2 (SSX2); Receptor for Advanced Glycation Endproducts (RAGE-1); renal ubiquitous 1 (RU1); renal ubiquitous 2 (RU2); legumain; human papilloma virus E6 (HPV E6); human papilloma virus E7 (HPV E7); intestinal carboxyl esterase; heat shock protein 70-2 mutated (mut hsp70-2); CD79a; CD79b; CD72; Leukocyte-associated immunoglobulin-like receptor 1 (LAIR1); Fc fragment of IgA receptor (FCAR or CD89); Leukocyte immunoglobulin-like receptor subfamily A member 2 (LILRA2); CD300 molecule-like family member f (CD300LF); C-type lectin domain family 12 member A (CLECI2A); bone marrow stromal cell antigen 2 (BST2); EGF-like module-containing mucin-like hormone receptor-like 2 (EMR2); lymphocyte antigen 75 (LY75); Glypican-3 (GPC3); Fc receptor-like 5 (FCRL5); immunoglobulin lambda-like polypeptide 1 (IGLL1), MPL, Biotin, c-MYC epitope Tag, CD34, LAMP1 TROP2, GFRalpha4, CDH17, CDH6, NYBRI, CDH19, CD200R, Slea (CA19.9; Sialyl Lewis Antigen); Fucosyl-GM1, PTK7, gpNMB, CDH1-CD324, DLL3, CD276/B7H3, IL11Ra, IL13Ra2, CD179b-IGL11, TCRgamma-delta, NKG2D, CD32 (FCGR2A), Tn ag, Tim1-/HVCR1, CSF2RA (GM-CSFR-alpha), TGFbetaR2, Lews Ag, TCR-beta1 chain, TCR-beta2 chain, TCR-gamma chain, TCR-delta chain, FITC, Leutenizing hormone receptor (LHR), Follicle stimulating hormone receptor (FSHR), Gonadotropin Hormone receptor (CGHR or GR), CCR4, GD3, SLAMF6, SLAMF4, HIV1envelope glycoprotein, HTLV1-Tax, CMV pp65, EBV-EBNA3c, KSHV K8.1, KSHV-gH, influenza A hemagglutinin (HA), GAD, PDL1, Guanylyl cyclase C (GCC), auto antibody to desmoglein 3 (Dsg3), auto antibody to desmoglein 1 (Dsg1), HLA, HLA-A, HLA-A2, HLA-B, HLA-C, HLA-DP, HLA-DM, HLA-DOA, HLA-DOB, HLA-DQ, HLA-DR, HLA-G, IgE, CD99, Ras G12V, Tissue Factor 1 (TF1), AFP, GPRC5D, Claudin18.2 (CLD18A2 or CLDN18A.2), CLDN6, P-glycoprotein, STEAPI, Livl, Nectin-4, Cripto, MPL, gpA33, BST1/CD157, low conductance chloride channel, CLDN6, MMP16, UPK1B, BMPR1B, Ly6E, STEAPI, WISP1, SLC34A2 and the antigen recognized by TNT antibody.

[0211] Methods to express immune receptors (e.g., TCR, CAR, SIR, TFP, Ab-TCR etc) to generate cell therapy products are described in this disclosure and are also known in the art.

[0212] In an embodiment, the mobilized cells (e.g., immune cells, e.g., T cells or NK cells) of the disclosure are genetically modified so as to modify the expression of one or more of genes. In an exemplary embodiment, the mobilized cells of the disclosure are genetically modified to reduce or eliminate the expression of Tet2 gene. In an exemplary embodiment, the mobilized cells of the disclosure are genetically modified to reduce or eliminate the expression of TCR and HLA class I genes. In an exemplary embodiment, the mobilized cells of the disclosure are genetically modified to reduce or eliminate the expression of TCR-alpha (TRAC) gene and/or P2 macroglobulin gene. In an exemplary embodiment, the mobilized cells of the disclosure are genetically modified to alter the expression of BRD9, EZH2, MLL2, MLL3, MLL4, methylcytosine dioxygenase genes (e.g., Tet1, Tet2, Tet3), ATM, CHEK, FBXW10, BCOR, FAT1, ASXL1, PHF6, SF3B1, YY1, CBFb, Runx1, EHMT2 (G9A), SMARCA4, CREBBP, PRDM1/BLIMP1, HDAC2, TRAIL (TNFSF10) and Death Receptor 5 (DR5 or TNFRSF10B). In an exemplary embodiment, the mobilized cells of the disclosure are genetically modified to increase the expression of a gene (e.g., vFLIP-K13, NEMO, cJun, JAK3, STAT5 etc.). Methods to alter the expression of a gene to generate cell therapy products are described in this disclosure and are known in the art.

[0213] In an embodiment, the mobilized cells of the disclosure are used for the purpose of generating an immune response. In an embodiment, the mobilized cells of the disclosure are used for the purpose of generating a T cell immune response.

[0214] In an embodiment, the mobilized cells of the disclosure are further processed and purified into different subtypes prior to generation of cell therapy products. In an embodiment, the mobilized cells of the disclosure are depleted of TREGs (Regulatory T cells) by depletion of CD25^{hi} cells prior to generation of cell therapy products (e.g., CAR-T or TCR-T cells). Methods to collect, process, select or deplete different cell subsets for the generation of cell therapy products are described in this disclosure and are also known in the art.

[0215] In an embodiment, the mobilized cells of the disclosure are activated and/or expanded in vitro for the generation of cell therapy products. In an embodiment, the mobilized cells of the disclosure are activated and/or expanded in vitro for about 21 days (e.g., 1 day, 2 days, 3 days, 5 days, 7 days, 9 days, 12 days, 14 days, 21 days etc.) for the generation of cell therapy product. In some embodiments, mobilized cells of the disclosure are activated and/or expanded in vitro for more than 1 day (e.g., more than 1 day, 2 days, 3 days, 5 days, 7 days, 9 days, 12 days, 14 days, 21 days etc.) for the generation of cell therapy product. In an embodiment, the mobilized cells of the disclosure are activated and/or expanded in vitro prior to administration to the subject. In an embodiment, the mobilized cells of the disclosure are activated and/or expanded in vitro for about 21 days (e.g., 1 day, 2 days, 3 days, 5 days, 7 days, 9 days, 12 days, 14 days, 21 days etc.) prior to administration to the patient. In some embodiments, mobilized cells of the disclosure are activated and/or expanded in vitro for more than 1 day (e.g., more than 1 day, 2 days, 3 days, 5 days, 7 days, 9 days, 12 days, 14 days, 21 days etc.) prior to administration to the patient. In an embodiment, the mobilized cells of the disclosure are cryopreserved prior to administration to a subject. Methods to activate and expand cells for the generation of cell therapy products are described in this disclosure and are also known in the art. Methods to cryopreserve and administer cell therapy products are also described in this disclosure and known in the art.

[0216] In an embodiment, the mobilized cells of the disclosure are activated and/or expanded in vitro under culture conditions that include a CD3 antibody, a CD28 antibody and IL2. In an exemplary embodiment, the mobilized T cells are cultured in XVIVO medium (Lonza) supplanted with 10 ng/ml CD3 antibody, 10 ng/ml CD28 antibody and 30-100 IU recombinant human-IL2. In an exemplary embodiment, CD3/CD28 beads and 100 IU recombinant human-IL2 can be used. In an exemplary embodiment, cells are cultured at 37° C., in a 5% CO₂ humidified incubator. In an embodiment, the mobilized cells of the disclosure are activated and/or expanded in vitro under culture conditions that include cytokines such as IL-7, IL-15, IL-21, IL12F, or a combination thereof.

[0217] In an embodiment, the mobilized cells of the disclosure are activated and/or expanded in vitro under culture conditions that promote the generation of central memory T cells.

[0218] In an embodiment, the mobilized cells of the disclosure are activated and/or expanded in vitro under culture conditions that suppress the generation of TREGs. In an embodiment, the mobilized cells of the disclosure are activated and/or expanded in vitro under culture conditions that promote the generation of TREGs. In an embodiment, the mobilized cells of the disclosure are activated and/or expanded in vitro under culture conditions that supress the generation of suppressor T cells. In an embodiment, the mobilized cells of the disclosure are activated and/or expanded in vitro under culture conditions that promote the generation of suppressor T cells. Methods to activate and/or expand T cells to promote or suppress the generation of TREGs and suppressor T cells are known in the art.

[0219] In an embodiment, the mobilized cells of the disclosure are used to generate a cell therapy product expressing a native or a synthetic T cell receptor. In an embodiment, the mobilized cells of the disclosure are used to generate a cell therapy product expressing a chimeric antigen receptor, including a next generation CAR (e.g., a SIR, TFP, Ab-TCR, TAC, SuperCAR, etc.). In an embodiment, the mobilized cells of the disclosure are used to generate a cell therapy product expressing a native or a synthetic NK cell receptor. In an embodiment, the mobilized cells of the disclosure are used to generate a cell therapy product expressing a native or a synthetic macrophage receptor. In an embodiment, the mobilized cells of the disclosure are used to generate a vaccine, e.g., a T cell vaccine. Methods to generate cell therapy products expressing different receptors are described in this disclosure and are also known in the art.

[0220] In an embodiment, the cell therapy product generated from the mobilized cells of the disclosure are used for autologous administration; i.e., the cell therapy product is administered to the same subject from whom the mobilized cells were harvested. In an embodiment, the cell therapy product generated from the mobilized cells of the disclosure are used for allogeneic administration; i.e., the cell therapy product is administered to a different subject from than the one from whom the mobilized cells were harvested. Methods to use cell therapy products for autologous or allogeneic use are described in this disclosure and are also known in the art.

[0221] In an embodiment, the cell therapy product generated from the mobilized cells of the disclosure are used for the prevention and treatment of various diseases, (e.g., cancer, immune, degenerative and infectious diseases). In an embodiment, the cell therapy product generated from the mobilized cells of the disclosure are used for the prevention and treatment of various diseases in combination with other agents (e.g., chemotherapy drugs; antibodies, cytokines etc.).

[0222] In some embodiment, the use of a mobilization agent (e.g., CXCR4 antagonist, G-CSF, GM-CSF or Dasatinib) results in higher yield of the cell therapy product (e.g., CAR-T, SIR-T or TCR-T). In an embodiment, the use of a mobilization agent (e.g., CXCR4 antagonist, G-CSF, GM-CSF or Dasatinib) results in about 20% (e.g., 20%, 50%, 75%, 100% etc.) higher number of cells in the manufactured cell therapy product as compared to the cells (e.g., CAR-T, SIR-T or TCR-T cells) in cell therapy product manufactured from apheresis product collected without the use of the mobilization agent.

[0223] In an embodiment, the use of a mobilization agent (e.g., CXCR4 antagonist, G-CSF, GM-CSF or Dasatinib) results in shorter manufacturing time of cell therapy (e.g., CAR-T, SIR-T or TCR-T) product. In an embodiment, the use of a mobilization agent (e.g., CXCR4 antagonist, G-CSF, GM-CSF or Dasatinib) results in about 10% (e.g., 20%, 50%, 75%, 100% etc.) shorter manufacturing time for cell therapy product as compared to the manufacturing time for cell therapy product manufactured from apheresis product collected without the use of the mobilization agent.

[0224] In an embodiment, the use of a mobilization agent (e.g., CXCR4 antagonist, G-CSF, GM-CSF or Dasatinib) results in fewer failures in the manufacturing of cell therapy (e.g., CAR-T, SIR-T or TCR-T) product. In an embodiment, the use of a mobilization agent (e.g., CXCR4 antagonist, G-CSF, GM-CSF or Dasatinib) results in about 10% (e.g., 20%, 50%, 75%, 100% etc.) reduction in the manufacturing failure for cell therapy product as compared to the manufacturing failure for cell therapy product manufactured from apheresis product collected without the use of the mobilization agent.

[0225] In an embodiment, the use of a mobilization agent (e.g., CXCR4 antagonist, G-CSF, GM-CSF or Dasatinib) results in lower cost of manufacturing of cell therapy (e.g., CAR-T, SIR-T or TCR-T) product. In an embodiment, the use of a mobilization agent (e.g., CXCR4 antagonist, G-CSF, GM-CSF or Dasatinib) results in about 10% (e.g., 20%, 50%, 75%, 100% etc.) reduction in the manufacturing cost for cell therapy product as compared to the manufacturing failure for cell therapy product manufactured from apheresis product collected without the use of the mobilization agent.

[0226] In an embodiment, the use of a mobilization agent (e.g., CXCR4 antagonist, G-CSF, GM-CSF or Dasatinib) results in improved diversity of cell therapy e.g., CAR-T, SIR-T or TCR-T) product. In an embodiment, the use of a mobilization agent (e.g., CXCR4 antagonist, G-CSF, GM-CSF or Dasatinib) results in about 10% (e.g., 20%, 50%, 75%, 100% etc.) higher diversity of cell therapy product as compared to the cell therapy product manufactured from apheresis product collected without the use of the mobilization agent. Diversity of a cell therapy product can be measured by methods known in the art such as clonal analysis, multi-color flow cytometry and the like.

[0227] In an embodiment, the cell therapy product generated from a population of cells that had been collected (e.g. apheresis product) following the administration of mobilization agents (e.g., CXCR4 antagonist, G-CSF, GM-CSF or Dasatinib etc) show no significant loss of cytotoxicity activity or improved cytotoxicity against their target cells as compared to a cell therapy product generated from a population of cells that had been collected (e.g. apheresis product) without the administration of mobilization agents. In an embodiment, the use of a mobilization agent (e.g., CXCR4 antagonist, G-CSF, GM-CSF or Dasatinib) results in no greater than 50% (e.g., 20%, 25%, 45% etc.) loss of cytotoxicity of cell therapy product as compared to the cell therapy product manufactured from apheresis product collected without the use of the mobilization agent. The cytotoxicity of a cell therapy product can be measured using methods known in the art, such as the Matador cytotoxicity assay or radioactive chromium release assay.

[0228] In an embodiment, the cell therapy product generated from a population of cells that had been collected (e.g. apheresis product) following the administration of mobilization agents (e.g., CXCR4 antagonist, G-CSF, GM-CSF or Dasatinib etc) show improved or no significant loss of target antigen-induced cytokine production (TNFα, IL2, IFNγ) as compared to a cell therapy product generated from a population of cells that had been collected (e.g. apheresis product) without the administration of mobilization agents. In an embodiment, the use of a mobilization agent (e.g., CXCR4 antagonist, G-CSF, GM-CSF or Dasatinib) results in no more than 50% (e.g., 20%, 25%, 50%, etc.) loss of target antigen induced cytokine production of cell therapy product as compared to the cell therapy product manufactured from apheresis product collected without the use of the mobilization agent. Cytokine production by the cell therapy product is measured using methods known in the art, such as ELISA and Flow cytometry etc.

[0229] In an embodiment, the cell therapy product generated from a population of cells that had been collected (e.g. apheresis product) following the administration of mobilization agents (e.g., CXCR4 antagonist, G-CSF, GM-CSF or Dasatinib etc) show improved or no significant loss of in vivo efficacy as compared to a cell therapy product generated from a population of cells that had been collected (e.g. apheresis product) without the administration of mobilization agents. In an embodiment, the use of a mobilization agent (e.g., CXCR4 antagonist, G-CSF, GM-CSF or Dasatinib) results in no more than 50% (e.g., 20%, 25%, 50%, etc.) loss of in vivo efficacy of cell therapy product as compared to the cell therapy product manufactured from apheresis product collected without the use of the mobilization agent. The vivo efficacy of a cell therapy product is measured using methods known in the art, such as xenograft studies in immunodeficient mice.

[0230] In an embodiment, the cell therapy product generated from a population of cells that had been collected (e.g. apheresis product) following the administration of mobilization agents (e.g., CXCR4 antagonist, G-CSF, GM-CSF or Dasatinib etc) show improved or no significant loss of stem like T cells as compared to a cell therapy product generated from a population of cells that had been collected (e.g. apheresis product) without the administration of mobilization agents. In an embodiment, the use of a mobilization agent (e.g., CXCR4 antagonist, G-CSF, GM-CSF or Dasatinib) results in no more than 50% (e.g., no more than 20%, 25%, 50%, etc.) loss of stem like T cells in the cell therapy product as compared to the cell therapy product manufactured from apheresis product collected without the use of the mobilization agent. The stem like T cell population in the cell therapy product is measured by Flow cytometry using markers (e.g., CD62L+, CD7+, Pgp+) known in the art.

[0231] In an embodiment, the cell therapy product generated from a population of cells that had been collected (e.g. apheresis product) following the administration of mobilization agents (e.g., CXCR4 antagonist, G-CSF, GM-CSF or Dasatinib etc) show improved or no significant loss of naïve T cells as compared to a cell therapy product generated from a population of cells that had been collected (e.g. apheresis product) without the administration of mobilization agents. In an embodiment, the use of a mobilization agent (e.g., CXCR4 antagonist, G-CSF, GM-CSF or Dasatinib) results in no more than 50% (e.g., no more than 20%, 25%, 50%, etc.) loss of naive T cells in the cell therapy product as compared to the cell therapy product manufactured from apheresis product collected without the use of the mobilization agent. The naive T cell population in the cell therapy product is measured by Flow cytometry using markers known in the art.

[0232] In an embodiment, the cell therapy product generated from a population of cells that had been collected (e.g. apheresis product) following the administration of mobilization agents (e.g., CXCR4 antagonist, G-CSF, GM-CSF or Dasatinib etc) show improved or no significant loss of central memory T cells as compared to a cell therapy product generated from a population of cells that had been collected (e.g. apheresis product) without the administration of mobilization agents. In an embodiment, the use of a mobilization agent (e.g., CXCR4 antagonist, G-CSF, GM-CSF or Dasatinib) results in no more than 50% (e.g., no more than 20%, 25%, 50%, etc.) loss of central memory T cells in the cell therapy product as compared to the cell therapy product manufactured from apheresis product collected without the use of the mobilization agent. The central memory T cell population in the cell therapy product is measured by Flow cytometry using markers known in the art.

[0233] In an embodiment, the cell therapy product generated from a population of cells that had been collected (e.g. apheresis product) following the administration of mobilization agents (e.g., CXCR4 antagonist, G-CSF, GM-CSF or Dasatinib etc) show improved or no significant loss of effector T cells as compared to a cell therapy product generated from a population of cells that had been collected (e.g. apheresis product) without the administration of mobilization agents. In an embodiment, the use of a mobilization agent (e.g., CXCR4 antagonist, G-CSF, GM-CSF or Dasatinib) results in no more than 50% (e.g., no more than 20%, 25%, 50%, etc.) loss of effector T cells in the cell therapy product as compared to the cell therapy product manufactured from apheresis product collected without the use of the mobilization agent. The effector T cell population in the cell therapy product is measured by Flow cytometry using markers known in the art.

[0234] In an embodiment, the cell therapy product generated from a population of cells that had been collected (e.g. apheresis product) following the administration of mobilization agents (e.g., CXCR4 antagonist, G-CSF, GM-CSF or Dasatinib etc) show no major enrichment of regulatory T cells (e.g. TREGs) as compared to a cell therapy product generated from a population of cells that had been collected (e.g. apheresis product) without the administration of mobilization agents. In an embodiment, the use of a mobilization agent (e.g., CXCR4 antagonist, G-CSF, GM-CSF or Dasatinib) results in no more than 50% (e.g., no more than 20%, 25%, 50%, etc.) increase in the proportion of regulatory T cells (TREGs) in the cell therapy product as compared to the cell therapy product manufactured from apheresis product collected without the use of the mobilization agent. The TREGs population in the cell therapy product is measured by Flow cytometry using markers known in the art.

[0235] In an embodiment, the use of a mobilization agent (e.g., CXCR4 antagonist, G-CSF, GM-CSF or Dasatinib) results in no significant loss and/or improved polyfuncationality (e.g., antigen induced IL2, TNFα, IFNγ production) of cell therapy e.g., CAR-T, SIR-T or TCR-T) product. In an embodiment, the use of a mobilization agent (e.g., CXCR4 antagonist, G-CSF, GM-CSF or Dasatinib) results in about 10% (e.g., 20%, 50%, 75%, 100% etc.) higher polyfunctionality of cell therapy product as compared to the cell therapy product manufactured from apheresis product collected without the use of the mobilization agent.

[0236] In an embodiment, the use of a mobilization agent (e.g., CXCR4 antagonist, G-CSF, GM-CSF or Dasatinib) results in no significant loss and/or improved in vivo expansion of cell therapy e.g., CAR-T, SIR-T or TCR-T) product. In an embodiment, the use of a mobilization agent (e.g., CXCR4 antagonist, G-CSF, GM-CSF or Dasatinib) results in about 10% (e.g., 20%, 50%, 75%, 100% etc.) higher expansion of cell therapy product following administration to the subject as compared to the cell therapy product manufactured from apheresis product collected without the use of the mobilization agent.

[0237] In an embodiment, the use of a mobilization agent (e.g., CXCR4 antagonist, G-CSF, GM-CSF or Dasatinib) results in no significant loss and/or improved persistence of cell therapy e.g., CAR-T, SIR-T or TCR-T) product. In an embodiment, the use of a mobilization agent (e.g., CXCR4 antagonist, G-CSF, GM-CSF or Dasatinib) results in about 10% (e.g., 20%, 50%, 75%, 100% etc.) greater persistence of cell therapy product following administration to the subject as compared to the cell therapy product manufactured from apheresis product collected without the use of the mobilization agent.

[0238] In an embodiment, the use of a mobilization agent (e.g., CXCR4 antagonist, G-CSF, GM-CSF or Dasatinib) results in improved or no significant loss of tissue (e.g. tumor) penetration of cell therapy e.g., CAR-T, SIR-T or TCR-T) product. In an embodiment, the use of a mobilization agent (e.g., CXCR4 antagonist, G-CSF, GM-CSF or Dasatinib) results in about 10% (e.g., 20%, 50%, 75%, 100% etc.) greater tissue (e.g. tumor) penetration of cell therapy product following administration to the subject as compared to the cell therapy product manufactured from apheresis product collected without the use of the mobilization agent.

[0239] In an embodiment, the use of a mobilization agent (e.g., CXCR4 antagonist, G-CSF, GM-CSF or Dasatinib) results in improved or no significant loss of anti-tumor efficacy of cell therapy e.g., CAR-T, SIR-T or TCR-T) product. In an embodiment, the use of a mobilization agent (e.g., CXCR4 antagonist, G-CSF, GM-CSF or Dasatinib) results in about 10% (e.g., 20%, 50%, 75%, 100% etc.) greater anti-tumor efficacy of cell therapy product following administration to the subject as compared to the cell therapy product manufactured from apheresis product collected without the use of the mobilization agent.

[0240] In an embodiment, the use of a mobilization agent (e.g., CXCR4 antagonist, G-CSF, GM-CSF or Dasatinib) results no significant increase in the toxicity (e.g., cytokine release syndrome, neurotoxicity etc.) of cell therapy e.g., CAR-T, SIR-T or TCR-T) product.

[0241] In certain aspects of the present disclosure, immune effector cells, e.g., T cells, can be obtained from a unit of blood collected from a subject using any number of techniques known to the skilled artisan, such as Ficoll™ separation. In one preferred aspect, cells from the circulating blood of an individual are obtained by apheresis. The apheresis product typically contains lymphocytes, including T cells, monocytes, granulocytes, B cells, other nucleated white blood cells, red blood cells, and platelets. In one aspect, the cells collected by apheresis may be washed to remove the plasma fraction and, optionally, to place the cells in an appropriate buffer or media for subsequent processing steps. In one embodiment, the cells are washed with phosphate buffered saline (PBS). In an alternative embodiment, the wash solution lacks calcium and may lack magnesium or may lack many if not all divalent cations.

[0242] In one aspect, T cells are isolated from peripheral blood lymphocytes by lysing the red blood cells and depleting the monocytes, for example, by centrifugation through a PERCOLL™ gradient or by counterflow centrifugal elutriation.

[0243] In one embodiment, the mobilized cells are further enriched for cells that expresses P-glycoprotein ((P-gp or Pgp; MDR1, ABCB1, CD243). In one embodiment, the mobilized cells are enriched for cells that stains dull with dyes that are substrates of P-glycoprotein mediated efflux as described in application no. PCT/US2017/042248, which is incorporated herein by reference. In some embodiments, cells which lack expression of p-gp or p-gp activity are removed from the population.

[0244] The methods described herein can include more than one selection step, e.g., more than one depletion step.

[0245] The methods described herein can further include removing cells from the population which express a tumor antigen, e.g., CD19, CD30, CD38, CD123, CD20/MS4A1, CD14 or CD11b. Also provided are methods that include removing cells from the population which express a check point inhibitor.

[0246] The methods described herein can further include removing regulatory T cells (TREGs) from the mobilized cells. Methods for removal of TREGs are known in the art and include removal of CD25 expressing T cells.

[0247] In one embodiment, a T cell population can be selected that expresses one or more of IFN-γ, TNFα, IL-17A, IL-2, IL-3, IL-4, GM-CSF, IL-10, IL-13, granzyme B, and perforin, or other appropriate molecules, e.g., other cytokines. Methods for screening for cell expression can be determined, e.g., by the methods described in PCT Publication No.: WO 2013/126712.

[0248] T cells for stimulation can also be frozen after a washing step.

[0249] Also contemplated in the context of the disclosure is the collection of blood samples or apheresis product from a subject at a time period prior to when the expanded cells as described herein might be needed. In one aspect a blood sample or an apheresis is taken from a generally healthy subject. In certain aspects, a blood sample or an apheresis is taken from a generally healthy subject who is at risk of developing a disease, but who has not yet developed a disease, and the cells of interest are isolated and frozen for later use.

[0250] In certain aspects, the T cells may be expanded, frozen, and used at a later time. In certain aspects, samples are collected from a patient shortly after diagnosis of a particular disease as described herein but prior to any treatments.

[0251] The disclosure also provides BRD9, EZH2, MLL2, MLL3, MLL4, methylcytosine dioxygenase genes (e.g., Tet1, Tet2, Tet3), ATM, CHEK, FBXW10, BCOR, FAT1, ASXL1, PHF6, SF3B1, YY1, CBFb, Runx1, EHMT2 (G9A), SMARCA4, CREBBP, PRDM1/BLIMP1, HDAC2, TRAIL and DR5 inhibitors and methods of use therefore. In particular, the disclosure provides immune effector cells, e.g., CAR- and TCR-expressing T cells, comprising BRD9, EZH2, MLL2, MLL3, MLL4, methylcytosine dioxygenase genes (e.g., Tet1, Tet2, Tet3), ATM, CHEK, FBXW10, BCOR, FAT1, ASXL1, PHF6, SF3B1, YY1, CBFb, Runx1, EHMT2 (G9A), SMARCA4, CREBBP, PRDM1/BLIMP1, HDAC2, TRAIL and DR5 inhibitors, and use of BRD9, EZH2, MLL2, MLL3, MLL4, methylcytosine dioxygenase genes (e.g., Tet1, Tet2, Tet3), ATM, CHEK, FBXW10, BCOR, FAT1, ASXL1, PHF6, SF3B1, YY1, CBFb, Runx1, EHMT2 (G9A), SMARCA4, CREBBP, PRDM1/BLIMP1, HDAC2, TRAIL and DR5 inhibitors in connection with immune effector cellular therapy product, e.g., CAR-T cells or TCR-T cells. BRD9, EZH2, MLL2, MLL3, MLL4, methylcytosine dioxygenase genes (e.g., Tet1, Tet2, Tet3), ATM, CHEK, FBXW10, BCOR, FAT1, ASXL1, PHF6, SF3B1, YY1, CBFb, Runx1, EHMT2 (G9A), SMARCA4, CREBBP, PRDM1/BLIMP1, HDAC2, TRAIL and DR5 inhibitors of the disclosure, together with their methods of use, are described in more detail below.

[0252] In an embodiment the immune effector cell therapy product is a CAR-T cell or a TCR-T cell or a BiTE, wherein the CAR-T/TCR-T or BiTE is targeted to, but not limited to, one or more of antigens selected from the group of CD5, CD19; CD123; CD22; CD30; CD171; CS1 (also referred to as CD2 subset 1, CRACC, SLAMF7, CD319, and 19A24); C-type lectin-like molecule-1 (CLL-1 or CLECL1); CD33; epidermal growth factor receptor variant III (EGFRviii); ganglioside G2 (GD2); ganglioside GD3 (aNeu5Ac(2-8)aNeu5Ac(2-3)bDGalp(1-4)bDGlcp(1-1)Cer); TNF receptor family member B cell maturation (BCMA); Tn antigen ((Tn Ag) or (GalNAcα-Ser/Thr)); prostate-specific membrane antigen (PSMA); Receptor tyrosine kinase-like orphan receptor 1 (ROR1); Fins Like Tyrosine Kinase 3 (FLT3); Tumor-associated glycoprotein 72 (TAG72); CD38; CD44v6; a glycosylated CD43 epitope expressed on acute leukemia or lymphoma but not on hematopoietic progenitors, a glycosylated CD43 epitope expressed on non-hematopoietic cancers, Carcinoembryonic antigen (CEA); Epithelial cell adhesion molecule (EPCAM); B7H3 (CD276); KIT (CD117); Interleukin-13 receptor subunit alpha-2 (IL-13Ra2 or CD213A2); Mesothelin; Interleukin 11 receptor alpha (IL-11Ra); prostate stem cell antigen (PSCA); Protease Serine 21 (Testisin or PRSS21); vascular endothelial growth factor receptor 2 (VEGFR2); Lewis(Y) antigen; CD24; Platelet-derived growth factor receptor beta (PDGFR-beta); Stage-specific embryonic antigen-4 (SSEA-4); CD20/MS4A1; Folate receptor alpha (FRa or FRI); Folate receptor beta (FRb); Receptor tyrosine-protein kinase ERBB2 (Her2/neu); Mucin 1, cell surface associated (MUC1); epidermal growth factor receptor (EGFR); neural cell adhesion molecule (NCAM); Prostase; prostatic acid phosphatase (PAP); elongation factor 2 mutated (ELF2M); Ephrin B2; fibroblast activation protein alpha (FAP); insulin-like growth factor 1 receptor (IGF-I receptor), carbonic anhydrase IX (CA1X); Proteasome (Prosome, Macropain) Subunit, Beta Type, 9 (LMP2); glycoprotein 100 (gp100); oncogene fusion protein consisting of breakpoint cluster region (BCR) and Abelson murine leukemia viral oncogene homolog 1 (Abl) (bcr-abl); tyrosinase; ephrin type-A receptor 2 (EphA2); sialyl Lewis adhesion molecule (sLe); ganglioside GM3 (aNeu5Ac(2-3)bDClalp(1-4)bDGlcp(1-1)Cer); transglutaminase 5 (TGS5); high molecular weight-melanoma associated antigen (HMWMAA); o-acetyl-GD2 ganglioside (OAcGD2); tumor endothelial marker 1 (TEM1/CD248); tumor endothelial marker 7-related (TEM7R); claudin 6 (CLDN6); thyroid stimulating hormone receptor (TSHR); G protein coupled receptor class C group 5, member D (GPRC5D); chromosome X open reading frame 61 (CXORF61); CD97; CD179a; anaplastic lymphoma kinase (ALK); Polysialic acid; placenta-specific 1 (PLAC1); hexasaccharide portion of globoH glycoceramide (GloboH); mammary gland differentiation antigen (NY-BR-1); uroplakin 2 (UPK2); Hepatitis A virus cellular receptor 1 (HAVCR1); adrenoceptor beta 3 (ADRB3); pannexin 3 (PANX3); G protein-coupled receptor 20 (GPR20); lymphocyte antigen 6 complex, locus K 9 (LY6K); Olfactory receptor 51E2 (OR51E2); TCR Gamma Alternate Reading Frame Protein (TARP); Wilms tumor protein (WT1); Cancer/testis antigen 1 (NY-ESO-1); Cancer/testis antigen 2 (LAGE-1a); Melanoma-associated antigen 1 (MAGE-A1); ETS translocation-variant gene 6, located on chromosome 12p (ETV6-AML); sperm protein 17 (SPA17); X Antigen Family, Member 1A (XAGE1); angiopoietin-binding cell surface receptor 2 (Tie 2); melanoma cancer testis antigen-1 (MAD-CT-1); melanoma cancer testis antigen-2 (MAD-CT-2); Fos-related antigen 1; tumor protein p53 (p53); p53 mutant; prostein; survivin; telomerase; prostate carcinoma tumor antigen-1 (PCT A-1 or Galectin 8), melanoma antigen recognized by T cells 1 (MelanA or MARTI); Rat sarcoma (Ras) mutant; human Telomerase reverse transcriptase (hTERT); sarcoma translocation breakpoints; melanoma inhibitor of apoptosis (ML-IAP); ERG (transmembrane protease, serine 2 (TMPRSS2) ETS fusion gene); N-Acetyl glucosaminyl-transferase V (NA17); paired box protein Pax-3 (PAX3); Androgen receptor; Cyclin B1; v-myc avian myelocytomatosis viral oncogene neuroblastoma derived homolog (MYCN); Ras Homolog Family Member C (RhoC); Tyrosinase-related protein 2 (TRP-2); Cytochrome P450 1B 1 (CYP1B 1); CCCTC-Binding Factor (Zinc Finger Protein)-Like (BORIS or Brother of the Regulator ofimprinted Sites), Squamous Cell Carcinoma Antigen Recognized By T Cells 3 (SART3); Paired box protein Pax-5 (PAX5); proacrosin binding protein sp32 (OY-TES1); lymphocyte-specific protein tyrosine kinase (LCK); A kinase anchor protein 4 (AKAP-4); synovial sarcoma, X breakpoint 2 (SSX2); Receptor for Advanced Glycation Endproducts (RAGE-1); renal ubiquitous 1 (RU1); renal ubiquitous 2 (RU2); legumain; human papilloma virus E6 (HPV E6); human papilloma virus E7 (HPV E7); intestinal carboxyl esterase; heat shock protein 70-2 mutated (mut hsp70-2); CD79a; CD79b; CD72; Leukocyte-associated immunoglobulin-like receptor 1 (LAIR1); Fc fragment of IgA receptor (FCAR or CD89); Leukocyte immunoglobulin-like receptor subfamily A member 2 (LILRA2); CD300 molecule-like family member f (CD300LF); C-type lectin domain family 12 member A (CLEC12A); bone marrow stromal cell antigen 2 (BST2); EGF-like module-containing mucin-like hormone receptor-like 2 (EMR2); lymphocyte antigen 75 (LY75); Glypican-3 (GPC3); Fc receptor-like 5 (FCRL5); immunoglobulin lambda-like polypeptide 1 (IGLL1), MPL, Biotin, c-MYC epitope Tag, CD34, LAMP1 TROP2, GFRalpha4, CDH17, CDH6, NYBRI, CDH19, CD200R, Slea (CA19.9; Sialyl Lewis Antigen); Fucosyl-GM1, PTK7, gpNMB, CDH1-CD324, DLL3, CD276/B7H3, IL11Ra, IL13Ra2, CD179b-IGL11, TCRgamma-delta, NKG2D, CD32 (FCGR2A), Tn ag, Timi-/HVCRi, CSF2RA (GM-CSFR-alpha), TGFbetaR2, Lews Ag, TCR-beta1 chain, TCR-beta2 chain, TCR-gamma chain, TCR-delta chain, FITC, Leutenizing hormone receptor (LHR), Follicle stimulating hormone receptor (FSHR), Gonadotropin Hormone receptor (CGHR or GR), CCR4, GD3, SLAMF6, SLAMF4, HIV1envelope glycoprotein, HTLV1-Tax, CMV pp65, EBV-EBNA3c, KSHV K8.1, KSHV-gH, influenza A hemagglutinin (HA), GAD, PDL1, Guanylyl cyclase C (GCC), auto antibody to desmoglein 3 (Dsg3), auto antibody to desmoglein 1 (Dsg1), HLA, HLA-A, HLA-A2, HLA-B, HLA-C, HLA-DP, HLA-DM, HLA-DOA, HLA-DOB, HLA-DQ, HLA-DR, HLA-G, IgE, CD99, Ras G12V, Tissue Factor 1 (TF1), AFP, GPRC5D, Claudin18.2 (CLD18A2 or CLDN18A.2), CLDN6, P-glycoprotein, STEAPI, Livl, Nectin-4, Cripto, MPL, gpA33, BST1/CD157, low conductance chloride channel, CLDN6, MMP16, UPK1B, BMPR1B, Ly6E, STEAPI, WISP1, SLC34A2 and the antigen recognized by TNT antibody.

[0253] The disclosure provides inhibitors of BRD9, EZH2, MLL2, MLL3, MLL4, methylcytosine dioxygenase genes (e.g., Tet1, Tet2, Tet3), ATM, CHEK, FBXW10, BCOR, FAT1, ASXL1, PHF6, SF3B1, YY1, CBFb, Runx1, EHMT2 (G9A), SMARCA4, CREBBP, PRDM1/BLIMP1, HDAC2, TRAIL and DR5, and methods for enhancing immune effector cell functions, e.g., CAR-expressing cell functions, by using such compositions and/or other means as described herein. Any inhibitors of BRD9, EZH2, MLL2, MLL3, MLL4, methylcytosine dioxygenase genes (e.g., Tet1, Tet2, Tet3), ATM, CHEK, FBXW10, BCOR, FAT1, ASXL1, PHF6, SF3B1, YY1, CBFb, Runx1, EHMT2 (G9A), SMARCA4, CREBBP, PRDM1/BLIMP1, HDAC2, TRAIL and DR5 known in the art can be used as a BRD9, EZH2, MLL2, MLL3, MLL4, methylcytosine dioxygenase genes (e.g., Tet1, Tet2, Tet3), ATM, CHEK, FBXW10, BCOR, FAT1, ASXL1, PHF6, SF3B1, YY1, CBFb, Runx1, EHMT2 (G9A), SMARCA4, CREBBP, PRDM1/BLIMP1, HDAC2, TRAIL and DR5 inhibitor according to the disclosure. In some embodiments, the inhibitors of TRAIL and DR5 are also used to prevent, ameliorate or treat the side effects, e.g., CRS and neurotoxicity, of immune therapy (e.g., Blinatumomab) and immune effector cell therapy products (e.g., CAR-T). Examples of inhibitors of BRD9, EZH2, MLL2, MLL3, MLL4, methylcytosine dioxygenase genes (e.g., Tet1, Tet2, Tet3), ATM, CHEK, FBXW10, BCOR, FAT1, ASXL1, PHF6, SF3B1, YY1, CBFb, Runx1, EHMT2 (G9A), SMARCA4, CREBBP, PRDM1/BLIMP1, HDAC2, TRAIL and DR5 are described below.

[0254] According to the disclosure, gene editing systems can be used as inhibitors of BRD9, EZH2, MLL2, MLL3, MLL4, methylcytosine dioxygenase genes (e.g., Tet1, Tet2, Tet3), ATM, CHEK, FBXW10, BCOR, FAT1, ASXL1, PHF6, SF3B1, YY1, CBFb, Runx1, EHMT2 (G9A), SMARCA4, CREBBP, PRDM1/BLIMP1, HDAC2, TRAIL and DR5. Also contemplated by the disclosure are the uses of nucleic acid encoding one or more components of a BRD9, EZH2, MLL2, MLL3, MLL4, methylcytosine dioxygenase genes (e.g., Tet1, Tet2, Tet3), ATM, CHEK, FBXW10, BCOR, FAT1, ASXL1, PHF6, SF3B1, YY1, CBFb, Runx1, EHMT2 (G9A), SMARCA4, CREBBP, PRDM1/BLIMP1, HDAC2, TRAIL and DR5 gene editing system. A number of gene editing systems, such as CRISPR/Cas9, Zn finger nucleases, Talons etc are known in the art and can be used in the methods of the disclosure.

[0255] The CRISPR/Cas system can be used to modify, e.g., delete one or more nucleic acids of a gene, or a gene regulatory element, or introduce a premature stop which thus decreases expression of a functional gene, e.g., BRD9. The CRISPR/Cas system can alternatively be used like RNA interference, turning off a gene in a reversible fashion. In a mammalian cell, for example, the RNA can guide the Cas protein to the BRD9 promoter, sterically blocking RNA polymerases.

[0256] An exemplary gRNA molecule of the disclosure comprises, e.g., consists of a first nucleic acid having the sequence (where the “n′”s refer to the residues of the targeting sequence (e.g., as described herein, e.g., in Table 8), and may consist of 15-25 nucleotides, e.g., consist of 20 nucleotides): nnnnnnnnnnnnnnnnnnnnGUUUUAGAGCUAUGCUGUUUUG (SEQ ID NO: 2041); and a second nucleic acid sequence having the sequence: AACUUACCAAGGAACAGCAUAGCAAGUUAAAAUAAGGCUAGUCCGUUAUCAAC UUGAAAAAGUGGCACCGAGUCGGUGC, optionally with 1, 2, 3, 4, 5, 6, or 7 (e.g., 4 or 7, e.g., 7) additional U nucleotides at the 3′ end (SEQ ID NO: 2042).

[0257] The second nucleic acid molecule may alternatively consist of a fragment of the sequence above, wherein such fragment is capable of hybridizing to the first nucleic acid. An example of such second nucleic acid molecule is: AACAGCAUAGCAAGUUAAAAUAAGGCUAGUCCGUUAUCAACUUGAAAAAG UGGCACCGAGUCGGUGC, optionally with 1, 2, 3, 4, 5, 6, or 7 (e.g., 4 or 7, e.g., 7) additional U nucleotides at the 3′ end (SEQ ID NO: 2054).

[0258] Another exemplary gRNA molecule of the disclosure comprises, e.g., consists of a first nucleic acid having the sequence (where the “n′”s refer to the residues of the targeting sequence (e.g., as described herein, e.g., in Table 8), and may consist of 15-25 nucleotides, e.g., consist of 20 nucleotides): nnnnnnnnnnnnnnnnnnnGUUUUAGAGCUAGAAAUAGCAAGUUAAAA UAAGGCUAGUCCGUUAUCAACUUGAAAAAGUGGCACCGAGUCGGUGC (SEQ ID NO: 2055), optionally with 1, 2, 3, 4, 5, 6, or 7 (e.g., 4 or 7, e.g., 4) additional U nucleotides at the 3′ end.

[0259] Alternatively, gRNAs containing the target-specific sequence for guiding Cas9 protein to genomic location of a gene can be obtained from commercial vendors, such as Integrated DNA Technologies (IDT). The crRNAs or crRNA XT, which form a gRNA duplex with tracrRNA, or sgRNAs, which are single RNA molecules comprised of both crRNA and tracrRNA sequences can be ordered pre-designed or custom-designed using user-defined protospacer designs at the IDT website (www.idtdna.com). The crRNA or sgRNAs can be used to edit a gene using the instructions of the manufacturer and/or methods known in the art.

[0260] In embodiments, the gRNA comprises a targeting sequence which is fully complementarity to 15-25 nucleotides, e.g., 20 nucleotides of the targeted gene, e.g., BRD9. In embodiments, the 15-25 nucleotides, e.g., 20 nucleotides, of the targeted gene are disposed immediately 5′ to a protospacer adjacent motif (PAM) sequence recognized by the Cas protein of the CRISPR/Cas system (e.g., where the system comprises a S. pyogenes Cas9 protein, the PAM sequence comprises NGG, where N can be any of A, T, G or C). Examples of gRNA targeting sequences (including the PAM sequences) which are useful in the various embodiments of the disclosure to inhibit target BRD9, EZH2, MLL2, MLL3, MLL4, methylcytosine dioxygenase genes (e.g., Tet1, Tet2, Tet3), ATM, CHEK, FBXW10, BCOR, FAT1, ASXL1, PHF6, SF3B1, YY1, CBFb, Runx1, EHMT2 (G9A), SMARCA4, CREBBP, PRDM1/BLIMP1, HDAC2, TRAIL, and/or DR5, are provided below in Table 4b.

[0261] In embodiments, the targeting sequence of the gRNA comprises, e.g., consists of, a RNA sequence complementary to a sequence listed in Table 4a. In embodiments, the gRNA comprises a sequence listed in Table 8.

[0262] In one embodiment, foreign DNA can be introduced into the cell along with the CRISPR/Cas system, e.g., DNA encoding a CAR, e.g., as described herein; depending on the sequences of the foreign DNA and chromosomal sequence, this process can be used to integrate the DNA encoding the CAR, e.g., as described herein, at or near the site targeted by the CRISPR/Cas system. As shown herein, in the examples, but without being bound by theory, such integration may lead to the expression of the CAR as well as disruption of the BRD9, EZH2, MLL2, MLL3, MLL4, methylcytosine dioxygenase genes (e.g., Tet1, Tet2, Tet3), ATM, CHEK, FBXW10, BCOR, FAT1, ASXL1, PHF6, SF3B1, YY1, CBFb, Runx1, EHMT2 (G9A), SMARCA4, CREBBP, PRDM1/BLIMP1, HDAC2, TRAIL, and/or DR5, gene. Such foreign DNA molecule is referred to herein as “template DNA.” In embodiments, the template DNA further comprises homology arms 5′ to, 3′ to, or both 5′ and 3′ to the nucleic acid of the template DNA which encodes the molecule or molecules of interest (e.g., which encodes a CAR described herein), wherein said homology arms are complementary to genomic DNA sequence flanking the target sequence.

[0263] In an embodiment, the CRISPR/Cas system of the disclosure comprises Cas9, e.g., S. pyogenes Cas9, and a gRNA comprising a targeting sequence which hybridizes to a sequence of the target gene, e.g. BRD9 gene. In an embodiment, the CRISPR/Cas system comprises nucleic acid encoding a BRD9, EZH2, MLL2, MLL3, MLL4, methylcytosine dioxygenase genes (e.g., Tet1, Tet2, Tet3), ATM, CHEK, FBXW10, BCOR, FAT1, ASXL1, PHF6, SF3B1, YY1, CBFb, Runx1, EHMT2 (G9A), SMARCA4, CREBBP, PRDM1/BLIMP1, HDAC2, TRAIL, and/or DR5 gRNA and nucleic acid encoding a Cas protein, e.g., Cas9, e.g., S. pyogenes Cas9. In an embodiment, the CRISPR/Cas system comprises a gRNA against the target gene and nucleic acid encoding a Cas protein, e.g., Cas9, e.g., S. pyogenes Cas9.

[0264] Examples of genomic target sequences for for which gRNAs comprising complementary targeting sequences can be generated for use in the disclosure are listed in the Table 4a below. In embodiments, the inhibitor is nucleic acid encoding a gRNA molecule specific for BRD9, EZH2, MLL2, MLL3, MLL4, methylcytosine dioxygenase genes (e.g., Tet1, Tet2, Tet3), ATM, CHEK, FBXW10, BCOR, FAT1, ASXL1, PHF6, SF3B1, YY1, CBFb, Runx1, EHMT2 (G9A), SMARCA4, CREBBP, PRDM1/BLIMP1, HDAC2, TRAIL, DR4 and DR5, wherein the nucleic acid comprises the sequence of a Target Sequence from the Table 4a, e.g., under the control of a U6- or H1-promoter. For example, the target sequence from Table 4a can be cloned in the pLenti-CRISPR-v2 vector (SEQ ID NO: 359) available from Addgene (Plasmid #52961) and following the instructions provided by the distributor. The lentiviral vectors encoding the gRNAs can be prepared and used according to the instructions provided by the distributor and methods described in Sanjana N E, Shalem O, Zhang F. Nat Methods. 2014 August; 11(8):783-4.

[0265] The pLenti-CRISPR-v2 vector vector also coexpresses the S. pyogenes Cas9 and a puromycin resistance gene. Alternatively, these gRNAs are expressed from one vector and the S. pyogenes Cas9 is expressed from another vector. Methods to express more than one gRNA from the same vector are known in the art (Kabadi A M V et al, Nucleic Acids Research, 2014, Vol. 42, No. 19 e147, 2014) and can be used in alternate embodiment of the disclosure.

TABLE 4a
gRNA target sequence within the indicated targeted genes.

| | Target | gRNA | Target context |
|---|---|---|---|
| TARGET GENE | Gene ID | SEQ ID NO | SEQ ID NO: |
| BRD9 | 65980 | 1 to 4 | 106-109 |
| EZH2 | 2146 | 5 to 8 | 110-113 |
| MLL2 | 8085 | 9 to 12 | 114-117 |
| MLL3 | 58508 | 13-16 | 118-121 |
| MLL4 (KMT2B) | 9757 | 17-20 | 122-125 |
| BRD8 | 10902 | 21-24 | 126-129 |
| CHEK2 | 11200 | 25-28 | 130-133 |
| TET1 | 80312 | 29-32 | 134-137 |
| TET2 | 54790 | 33-36 | 138-141 |
| TET3 | 200424 | 37-40 | 142-145 |
| ATM | 472 | 41-44 | 146-149 |
| FAT1 | 2195 | 45-48 | 150-153 |
| FBXW10 | 10517 | 49-52 | 154-157 |
| BCOR | 54880 | 53-56 | 158-161 |
| ASXL1 | 171023 | 57-60 | 162-165 |
| PHF6 | 84295 | 61-64 | 166-169 |
| KDM6A | 7403 | 65-68 | 170-173 |
| SF3B1 | 23451 | 69-72 | 174-177 |
| YY1 | 7528 | 73-76 | 178-181 |
| CBFB | 865 | 77-80 | 182-185 |
| Runx1 | 861 | 81-84 | 186-189 |
| PRDM1 (BLIMP1) | 639 | 85-88 | 190-193 |
| HDAC2 | 3066 | 89-92 | 194-197 |
| EHMT2 (G9A) | 10919 | 93-96 | 198-201 |
| SMARCA4 | 6597 | 97-100 | 202-205 |
| CREBBP | 1387 | 101-104 | 206-209 |
| TNFSF10 | 8743 | 1775-1778 | |
| TNFRSF10A | 8797 | 1779-1782 | |
| TNFRSF10B | 8795 | 1783-1786 | |

TABLE 4b
Target sequence with PAM sequence for
different gRNAs targeting different genes

| | SEQ ID NO | | SEQ ID NO |
|---|---|---|---|
| | of gRNA | | of gRNA |
| TARGET | with PAM | TARGET | with PAM |
| GENE | SEQUENCE | GENE | SEQUENCE |
| BRD9 | 500-549 | KDM6A | 1163-1212 |
| EZH2 | 551-600 | PHF6 | 1214-1263 |
| MLL2 | 602-651 | SF3B1 | 1265-1314 |
| (KMT2D) | | | |
| MLL3 | 653-702 | YY1 | 1316-1365 |
| (KMT2C) | | | |
| MLL4 | 704-753 | CBFB | 1367-1416 |
| (KMT2B) | | | |
| CHEK2 | 908-957 | RUNX1 | 1418-1467 |
| TET1 | 755-804 | PRDM1 | 1469-1518 |
| TET2 | 806-855 | HDAC2 | 1520-1569 |
| TET3 | 857-906 | EHMT2 | 1571-1620 |
| ASXL1 | 959-1008 | SMARCA4 | 1622-1671 |
| ATM | 1010-1059 | CREBBP | 1673-1722 |
| FBXW10 | 1061-1110 | BCOR | 1724-1773 |
| FAT1 | 1112-1161 | TNFSF10 | 2060-2109 |
| TNFRSF10A | 2111-2160 | TNFRSF10B | 2162-2211 |

[0266] In addition to Cas9/CRISP, other gene editing methods, such as TALENS and Zn finger nucleases, can be used in alternate embodiment of the disclosure.

[0267] A BRD9, EZH2, MLL2, MLL3, MLL4, methylcytosine dioxygenase genes (e.g., Tet1, Tet2, Tet3), ATM, CHEK, FBXW10, BCOR, FAT1, ASXL1, PHF6, SF3B1, YY1, CBFb, Runx1, EHMT2 (G9A), SMARCA4, CREBBP, PRDM1/BLIMP1, HDAC2, TRAIL, and/or DR5 TALEN can be used inside a cell to produce a double-stranded break (DSB). A mutation can be introduced at the break site if the repair mechanisms improperly repair the break via non-homologous end joining.

[0268] TALENs specific to sequences a gene, e.g., BRD9, can be constructed using any method known in the art, including various schemes using modular components. Zhang et al. (2011) Nature Biotech. 29: 149-53; Geibler et al. (2011) PLoS ONE 6: e19509; U.S. Pat. Nos. 8,420,782; 8,470,973, the contents of which are hereby incorproated by reference in their entirety.

[0269] Like a TALEN, a ZFN can create a double-stranded break in the DNA, which can create a frame-shift mutation if improperly repaired, leading to a decrease in the expression and amount of a gene, e.g., BRD9, in a cell. ZFNs can also be used with homologous recombination to mutate a gene or to introduce nucleic acid encoding a CAR at a site at or near the targeted sequence. As discussed above, the nucleic acid encoding a CAR may be introduced as part of a template DNA. In embodiments, the template DNA further comprises homology arms 5′ to, 3′ to, or both 5′ and 3′ to the nucleic acid of the template DNA which encodes the molecule or molecules of interest (e.g., which encodes a CAR described herein), wherein said homology arms are complementary to genomic DNA sequence flanking the target sequence.

[0270] ZFNs specific to sequences in the BRD9, EZH2, MLL2, MLL3, MLL4, methylcytosine dioxygenase genes (e.g., Tet1, Tet2, Tet3), ATM, CHEK, FBXW10, BCOR, FAT1, ASXL1, PHF6, SF3B1, YY1, CBFb, Runx1, EHMT2 (G9A), SMARCA4, CREBBP, PRDM1/BLIMP1, HDAC2, TRAIL, and/or DR5 gene can be constructed using any method known in the art. Without being bound by theory, it is believed that use of gene editing systems (e.g., CRISPR/Cas gene editing systems) which target a gene may allow one to inhibit one or more functions of the targeted gene, for example, causing an editing event which results in expression of a truncated gene. Again, without being bound by theory, such truncated gene/protein may preserve one or more functions of the targeted gene/protein, while inhibiting one or more other functions. Gene editing systems which target a late exon or intron of a gene may be particularly preferred in this regard. In an aspect, the gene editing system of the disclosure targets a late exon or intron of the targeted gene, e.g., BRD9. In an aspect, the gene editing system inhibitor of the disclosure targets an exon or intron downstream of exon 8 when applicable.

[0271] Without being bound by theory, it may also be preferable in other embodiments to target an early exon or intron of targeted gene, e.g., BRD9 gene, for example, to introduce a premature stop codon in the targeted gene which results in no expression of the gene product, or expression of a completely non-functional gene product. Gene editing systems which target an early exon or intron of the targeted gene, e.g., BRD9 gene, may be particularly preferred in this regard. In an aspect, the gene editing system BRD9 inhibitor, e.g., BRD9 inhibitor of the disclosure targets an early exon or intron of the BRD9 gene. In an aspect, the gene editing system of the disclosure targets an exon or intron upstream of exon 4 of the targeted gene. In embodiments, the gene editing system inhibitor, e.g., a BRD9 inhibitor, targets exon 1, exon 2, or exon 3, e.g., exon 3, of the targeted gene, e.g., BRD9 gene.

[0272] Without being bound by theory, it may also be preferable in other embodiments to target a sequence of the gene that is specific to one or more isoforms of the above genes but does not affect one or more other isoforms of the above genes. In embodiments, it may be preferable to specifically target isoforms of the above genes which contain a catalytic and/or signaling domain.

[0273] According to the disclosure, double stranded RNA (“dsRNA”), e.g., siRNA or shRNA can be used as inhibitors of BRD9, EZH2, MLL2, MLL3, MLL4, methylcytosine dioxygenase genes (e.g., Tet1, Tet2, Tet3), ATM, CHEK, FBXW10, BCOR, FAT1, ASXL1, PHF6, SF3B1, YY1, CBFb, Runx1, EHMT2 (G9A), SMARCA4, CREBBP, PRDM1/BLIMP1, HDAC2, TRAIL, and/or DR5. Also contemplated by the disclosure are the uses of nucleic acid encoding said dsRNA BRD9, EZH2, MLL2, MLL3, MLL4, methylcytosine dioxygenase genes (e.g., Tet1, Tet2, Tet3), ATM, CHEK, FBXW10, BCOR, FAT1, ASXL1, PHF6, SF3B1, YY1, CBFb, Runx1, EHMT2 (G9A), SMARCA4, CREBBP, PRDM1/BLIMP1, HDAC2, TRAIL, and/or DR5, inhibitors.

[0274] Examples of nucleic acid sequences that encode shRNA sequences are provided in Table 5. The Target Sequence refers to the sequence within the BRD9, EZH2, MLL2, MLL3, MLL4, methylcytosine dioxygenase genes (e.g., Tet1, Tet2, Tet3), ATM, CHEK, FBXW10, BCOR, FAT1, ASXL1, PHF6, SF3B1, YY1, CBFb, Runx1, EHMT2 (G9A), SMARCA4, CREBBP, PRDM1/BLIMP1, HDAC2, TRAIL, and/or DR5 genomic DNA (or surrounding DNA). In embodiments, the BRD9, EZH2, MLL2, MLL3, MLL4, methylcytosine dioxygenase genes (e.g., Tet1, Tet2, Tet3), ATM, CHEK, FBXW10, BCOR, FAT1, ASXL1, PHF6, SF3B1, YY1, CBFb, Runx1, EHMT2 (G9A), SMARCA4, CREBBP, PRDM1/BLIMP1, HDAC2, TRAIL, and/or DR5 inhibitor is an siRNA or shRNA specific for a Target sequence listed below, or specific for its mRNA complement. In embodiments, the inhibitor is a shRNA encoded by the Nucleic Acid encoding the BRD9, EZH2, MLL2, MLL3, MLL4, methylcytosine dioxygenase genes (e.g., Tet1, Tet2, Tet3), ATM, CHEK, FBXW10, BCOR, FAT1, ASXL1, PHF6, SF3B1, YY1, CBFb, Runx1, EHMT2 (G9A), SMARCA4, CREBBP, PRDM1/BLIMP1, HDAC2, TRAIL, and/or DR5 shRNA of the Table 5.

[0275] In embodiments, the inhibitor is nucleic acid comprising BRD9, EZH2, MLL2, MLL3, MLL4, methylcytosine dioxygenase genes (e.g., Tet1, Tet2, Tet3), ATM, CHEK, FBXW10, BCOR, FAT1, ASXL1, PHF6, SF3B1, YY1, CBFb, Runx1, EHMT2 (G9A), SMARCA4, CREBBP, PRDM1/BLIMP1, HDAC2, TRAIL, and/or DR5 shRNA of the Table 5 below, e.g., which is under the control of a U6 or Hl promoter such that a BRD9, EZH2, MLL2, MLL3, MLL4, methylcytosine dioxygenase genes (e.g., Tet1, Tet2, Tet3), ATM, CHEK, FBXW10, BCOR, FAT1, ASXL1, PHF6, SF3B1, YY1, CBFb, Runx1, EHMT2 (G9A), SMARCA4, CREBBP, PRDM1/BLIMP1, HDAC2, TRAIL, and/or DR5, shRNA is produced. In embodiments, the disclosure provides a siRNA or shRNA comprising sequence which is the RNA analog (i.e., all T nucleic acid residues replaced with U nucleic acid residues) of the Target sequence of shRNA, e.g., the Target sequence of shRNA of any of the shRNAs of Table 5.

TABLE 5
Sequence of shRNAs targeting different genes

| | | shRNA target | Nucleic Acid |
|---|---|---|---|
| TARGET | Target | Sequence | encoding shRNA |
| GENE | Gene ID | SEQ ID NO: | SEQ ID NO: |
| BRD9 | 65980 | 230-232 | 293-295 |
| EZH2 | 2146 | 211-212 | 274-275 |
| MLL3 | 58508 | 223-225 | 286-288 |
| MLL4 | 9757 | 235-237 | 298-300 |
| (KMT2B) | | | |
| CHEK2 | 11200 | 219-220 | 282-283 |
| TET2 | 54790 | 215-216 | 278-279 |
| ATM | 472 | 213-214 | 276-277 |
| FAT1 | 2195 | 240-241 | 303-304 |
| FBXW10 | 10517 | 217-218 | 280-281 |
| BCOR | 54880 | 221-222 | 284-285 |
| YY1 | 7528 | 242-246 | 305-309 |
| CBFB | 865 | 247-249 | 310-312 |
| Runx1 | 861 | 250-252 | 313-315 |
| PRDM1 | 639 | 253-255 | 316-318 |
| (BLIMP1) | | | |
| HDAC2 | 3066 | 256-260 | 319-323 |
| EHMT2 | 10919 | 261-265 | 324-328 |
| (G9A) | | | |
| SMARCA4 | 6597 | 266-268 | 329-331 |
| CREBBP | 1387 | 269-272 | 332-335 |
| TNFSF10 | 8743 | 2213-2216 | 2226-2229 |
| TNFRSF10A | 8797 | 2217-2220 | 2230-2233 |
| TNFRSF10B | 8795 | 2221-2224 | 2234-2237 |

[0276] Additional dsRNA inhibitor of the above genes, e.g., shRNA and siRNA molecules can be designed and tested using methods known in the art and as described herein.

[0277] In embodiments, it may be preferable to specifically target isoforms of the genes, e.g., BRD9, which contain an active domain, e.g a catalytic domain or signaling domain.

[0278] Table 6 provides names and Cas # of several other chemical inhibitors targeting that can be used in the present disclosure to generate a diverse population of immune effector cells for the purpose of cellular therapy and to modify the effect of BiTEs and other immune therapy agents.

TABLE 6
Chemical inhibitors of different genes/proteins that can be
used in the methods of the disclosure.

| Class | Name | Cas # |
|---|---|---|
| BRD9 inhibitor | BI-7273 | 1883429-21-7 |
| BRD9 inhibitor | I-BRD9 | 1714146-59-4 |
| BRD7/BRD9 inhibitor | BI-9564 | 1883429-22-8 |
| BRD7/BRD9 inhibitor | LP99 | 1808951-93-0 |
| EZH2 inhibitor | Tazemetostat | 1403254-99-8 |
| | (EPZ-6438) | |
| EZH2 inhibitor | 3-Deazaneplanocin A | 102052-95-9 |
| EZH2 inhibitor | GSK503 | 1346572-63-1 |
| EZH2 inhibitor | GSK126 | 1346574-57-9 |
| EZH2 inhibitor | CPI-169 | 1450655-76-1 |
| EZH2 inhibitor | UNC1999 | 1431612-23-5 |
| EZH2 inhibitor | CPI-1205 | 1621862-70-1 |
| EZH2 inhibitor | El1 | 1418308-27-6 |
| EZH2 inhibitor | EPZ011989 | 1598383-40-4 |
| EZH2 inhibitor | GSK343 | 1346704-33-3 |
| EZH2 inhibitor | CPI-360 | 1802175-06-9 |
| EZH2 inhibitor | EPZ005687 | 1396772-26-1 |
| PCR2 inhibitor | EED226 | 2083627-02-3 |
| CBFβ-Runx1 Inhibitor | Ro5-3335 | 30195-30-3 |
| G9a inhibitor | UNC0642 | 1481677-78-4 |
| G9a inhibitor | BIX01294 | 1808255-64-2 |
| | (hydrochloride | |
| | hydrate) | |
| G9a inhibitor | UNC0321 | 1238673-32-9 |
| | (trifluoroacetate salt) | |
| G9a/GLP inhibitor | UNC0646 | 1320288-17-2 |
| G9a/GLP inhibitor | A-366 | 1527503-11-2 |
| G9a/GLP inhibitor | SGC707 | 1687736-54-4 |
| HDAC1/2/3 inhibitor | BRD6688 | 1404562-17-9 |
| HDAC 2/3 inhibitor | MI-192 | 1415340-63-4 |
| YY-1 (Proteasome Inhibitor) | NPI-0052 | 437742-34-2 |
| SMARCA2 (BRM), | PFI-3 | 1819363-80-8 |
| SMARCA4 (BRG1) and | | |
| polybromo-1 (PB1) Inhibitor | | |
| Inhibitors of CREBBP and | SGC-CBP30 | 1613695-14-9 |
| EP300 bromodomains | | |
| RasGAP, ERK1 and Tet2 | SC-1 (Pluripotin) | 839707-37-8 |
| Inhibitor | | |
| Tet2 | Meclofenamate | 6385-02-0 |
| Core Binding Factor-β | CBFβ Inhibitor | 493028-20-9 |
| Inhibitor | | |

[0279] According to the present disclosure, dominant negative mutants can be used as inhibitors of BRD9, EZH2, MLL2, MLL3, MLL4, methylcytosine dioxygenase genes (e.g., Tet1, Tet2, Tet3), ATM, CHEK, FBXW10, BCOR, FAT1, ASXL1, PHF6, SF3B1, YY1, CBFb, Runx1, EHMT2 (G9A), SMARCA4, CREBBP, PRDM1/BLIMP1, HDAC2, TRAIL, and/or DR5. In embodiments, the dominant negative mutants of the above genes lack catalytic or signaling function. An example of a dominant negative BRD9 is a protein comprising or consisting of SEQ ID NO: 1823 with the mutation Q479H, according to the numbering of SEQ ID NO: 1822. An example of a dominant negative BRD9 is a protein comprising or consisting of SEQ ID NO: 1823 with the mutation Q479H, according to the numbering of SEQ ID NO: 1821. An example of a dominant negative BRD9 is a protein comprising or consisting of SEQ ID NO: 1820 with the mutation N216A, according to the numbering of SEQ ID NO: 1822. In embodiments, the dominant negative BRD9 may include combinations of any of the aforementioned mutations. Examples of a dominant negative BCOR are proteins comprising or consisting of SEQ ID NO:1829 and 1830 with the mutations V896L and A165P, according to the numbering of SEQ ID NO:1828. In embodiments, the dominant negative BCOR may include combinations of any of the aforementioned mutations. An example of a dominant negative FBXW10 is a protein comprising or consisting of SEQ ID NO: 1826 with the mutation FBXW10-D318N, according to the numbering of SEQ ID NO:1825. An example of dominant negative DR5 is DR5-L363N which is represented by SEQ ID NO:2370.

[0280] In embodiments, an inhibitor of the disclosure is a dominant negative binding partner of BRD9, EZH2, MLL2, MLL3, MLL4, methylcytosine dioxygenase genes (e.g., Tet1, Tet2, Tet3), ATM, CHEK, FBXW10, BCOR, FAT1, ASXL1, PHF6, SF3B1, YY1, CBFb, Runx1, EHMT2 (G9A), SMARCA4, CREBBP, PRDM1/BLIMP1, HDAC2, TRAIL, and/or DR5, e.g., a dominant negative BRD9-binding partner or a dominant negative DR5 binding partner. In other embodiments, an inhibitor of the disclosure comprises nucleic acid encoding a dominant negative binding partner, e.g., a dominant negative BRD9-binding protein or a dominant negative DR5-binding protein. An example of a DR5 binding protein that can act in a dominant negative manner is a deletion mutant of FADD (Fas Associated Death Domain) containing its amino acids 80-208 that encodes the death domain of FADD but lacks its death effector domain (SEQ ID NO: 2463). Other examples are dominant negative mutants of Caspase 8, e.g., Caspase8 D73A (SEQ ID NO: 2464).

[0281] As described herein, the disclosure provides vectors, e.g., as described herein, which encode inhibitors, such as the gene editing systems, shRNA or siRNA inhibitors or dominant negative inhibitors of BRD9, EZH2, MLL2, MLL3, MLL4, methylcytosine dioxygenase genes (e.g., Tet1, Tet2, Tet3), ATM, CHEK, FBXW10, BCOR, FAT1, ASXL1, PHF6, SF3B1, YY1, CBFb, Runx1, EHMT2 (G9A), SMARCA4, CREBBP, PRDM1/BLIMP1, HDAC2, TRAIL, and/or DR5, e.g., BRD9 (e.g., as described herein).

[0282] In embodiments further comprising, for example, a CAR or a TCR, the nucleic acid may further comprise sequence encoding a CAR or TCR, e.g., as described herein. In some embodiments, the disclosure provides a vector comprising a nucleic acid sequence encoding an inhibitor described herein and comprising a nucleic acid sequence encoding a CAR or a TCR molecule described herein. In embodiments, nucleic acid sequences are disposed on separate vectors. In other embodiments, the two or more nucleic acid sequences are encoded by a single nucleic molecule in the same frame and as a single polypeptide chain. In this aspect, the two or more CARs can, e.g., be separated by one or more peptide cleavage sites. (e.g., an auto-cleavage site or a substrate for an intracellular protease). Examples of peptide cleavage sites include F2A (SEQ ID NO: 1845), T2A (SEQ ID NO: 1846 and 1847) and P2A (SEQ ID NO: 1848). These peptide cleavage sites are referred to collectively herein as “2A sites.”

[0283] In embodiments, the vector comprises nucleic acid sequence encoding a CAR described herein and nucleic acid sequence encoding a shRNA described herein. In embodiments, the vector comprises nucleic acid sequence encoding a CAR or a TCR described herein and nucleic acid sequence encoding a genome editing system described herein.

[0284] The disclosure provides methods of increasing the therapeutic efficacy of a CAR- or a TCR-expressing cell, e.g., a cell expressing a CAR or TCR as described herein, e.g., a CAR19-expressing cell (e.g., CTL019), comprising a step of reducing or eliminating the function or expression of BRD9, EZH2, MLL2, MLL3, MLL4, methylcytosine dioxygenase genes (e.g., Tet1, Tet2, Tet3), ATM, CHEK, FBXW10, BCOR, FAT1, ASXL1, PHF6, SF3B1, YY1, CBFb, Runx1, EHMT2 (G9A), SMARCA4, CREBBP, PRDM1/BLIMP1, HDAC2, TRAIL, and/or DR5. In embodiments, the method comprises contacting said cells with a BRD9, EZH2, MLL2, MLL3, MLL4, methylcytosine dioxygenase genes (e.g., Tet1, Tet2, Tet3), ATM, CHEK, FBXW10, BCOR, FAT1, ASXL1, PHF6, SF3B1, YY1, CBFb, Runx1, EHMT2 (G9A), SMARCA4, CREBBP, PRDM1/BLIMP1, HDAC2, TRAIL, and/or DR5 inhibitor as described herein.

[0285] The disclosure provides methods of increasing the safety of a CAR- or a TCR-expressing cell, e.g., a cell expressing a CAR or TCR as described herein, e.g., a CAR19-expressing cell (e.g., CTL019), comprising a step of reducing or eliminating the function or expression of TRAIL and/or DR5. In embodiments, the method comprises contacting said cells with a TRAIL and/or DR5 inhibitor as described herein.

[0286] The disclosure further provides methods of manufacturing a CAR and/or TCR-expressing cell, e.g., a CAR- and/or TCR-expressing cell having improved function (e.g., having improved efficacy, e.g., tumor targeting, or proliferation) comprising the step of reducing or eliminating the expression or function of BRD9, EZH2, MLL2, MLL3, MLL4, methylcytosine dioxygenase genes (e.g., Tet1, Tet2, Tet3), ATM, CHEK, FBXW10, BCOR, FAT1, ASXL1, PHF6, SF3B1, YY1, CBFb, Runx1, EHMT2 (G9A), SMARCA4, CREBBP, PRDM1/BLIMP1, HDAC2, TRAIL, and/or DR5 in said cell. In embodiments, the method comprises contacting said cells with a BRD9, EZH2, MLL2, MLL3, MLL4, methylcytosine dioxygenase genes (e.g., Tet1, Tet2, Tet3), ATM, CHEK, FBXW10, BCOR, FAT1, ASXL1, PHF6, SF3B1, YY1, CBFb, Runx1, EHMT2 (G9A), SMARCA4, CREBBP, PRDM1/BLIMP1, HDAC2, TRAIL, and/or DR5 inhibitor as described herein. In embodiments, the contacting is done ex vivo. In embodiments, the contacting is done in vivo. In embodiments, the contacting is done prior to simultaneously with or after said cells are modified to express a CAR or TCR, e.g., a CAR or TCR as described herein.

[0287] The disclosure further provides methods of manufacturing a CAR and/or TCR-expressing cell, e.g., a CAR- and/or TCR-expressing cell having improved safety (e.g., having less propensity to cause Cytokine Release Syndrome or neurotoxicity) comprising the step of reducing or eliminating the expression or function of TRAIL, and/or DR5 as described herein. In embodiments, the method comprises contacting said cells with a TRAIL, and/or DR5 inhibitor as described herein. In embodiments, the contacting is done ex vivo. In embodiments, the contacting is done in vivo. In embodiments, the contacting is done prior to simultaneously with or after said cells are modified to express a CAR or TCR, e.g., a CAR or TCR as described herein.

[0288] In embodiments, the disclosure provides a method for inhibiting a function or expression of BRD9, EZH2, MLL2, MLL3, MLL4, methylcytosine dioxygenase genes (e.g., Tet1, Tet2, Tet3), ATM, CHEK, FBXW10, BCOR, FAT1, ASXL1, PHF6, SF3B1, YY1, CBFb, Runx1, EHMT2 (G9A), SMARCA4, CREBBP, PRDM1/BLIMP1, HDAC2, TRAIL, and/or DR5 in a CAR/TCR-expressing cell, e.g., a cell expressing a CAR/TCR as described herein, e.g., a CAR19-expressing cell, the method comprising a step of reducing or eliminating the function or expression of BRD9, EZH2, MLL2, MLL3, MLL4, methylcytosine dioxygenase genes (e.g., Tet1, Tet2, Tet3), ATM, CHEK, FBXW10, BCOR, FAT1, ASXL1, PHF6, SF3B1, YY1, CBFb, Runx1, EHMT2 (G9A), SMARCA4, CREBBP, PRDM1/BLIMP1, HDAC2, TRAIL, and/or DR5. In embodiments, the method comprises contacting said cells with a BRD9, EZH2, MLL2, MLL3, MLL4, methylcytosine dioxygenase genes (e.g., Tet1, Tet2, Tet3), ATM, CHEK, FBXW10, BCOR, FAT1, ASXL1, PHF6, SF3B1, YY1, CBFb, Runx1, EHMT2 (G9A), SMARCA4, CREBBP, PRDM1/BLIMP1, HDAC2, TRAIL, and/or DR5 inhibitor as described herein.

[0289] In one embodiment, the disclosure provides a method, e.g., a method described above, comprises introducing nucleic acid encoding a CAR and/or TCR into a cell, e.g., an immune effector cell, e.g., a T cell, at a site within the BRD9, EZH2, MLL2, MLL3, MLL4, methylcytosine dioxygenase genes (e.g., Tet1, Tet2, Tet3), ATM, CHEK, FBXW10, BCOR, FAT1, ASXL1, PHF6, SF3B1, YY1, CBFb, Runx1, EHMT2 (G9A), SMARCA4, CREBBP, PRDM1/BLIMP1, HDAC2, TRAIL, and/or DR5 gene, or the regulatory elements of the BRD9, EZH2, MLL2, MLL3, MLL4, methylcytosine dioxygenase genes (e.g., Tet1, Tet2, Tet3), ATM, CHEK, FBXW10, BCOR, FAT1, ASXL1, PHF6, SF3B1, YY1, CBFb, Runx1, EHMT2 (G9A), SMARCA4, CREBBP, PRDM1/BLIMP1, HDAC2, TRAIL, and/or DR5 gens such that expression of BRD9, EZH2, MLL2, MLL3, MLL4, methylcytosine dioxygenase genes (e.g., Tet1, Tet2, Tet3), ATM, CHEK, FBXW10, BCOR, FAT1, ASXL1, PHF6, SF3B1, YY1, CBFb, Runx1, EHMT2 (G9A), SMARCA4, CREBBP, PRDM1/BLIMP1, HDAC2, TRAIL, and/or DR5 is disrupted. Integration at a site within the BRD9, EZH2, MLL2, MLL3, MLL4, methylcytosine dioxygenase genes (e.g., Tet1, Tet2, Tet3), ATM, CHEK, FBXW10, BCOR, FAT1, ASXL1, PHF6, SF3B1, YY1, CBFb, Runx1, EHMT2 (G9A), SMARCA4, CREBBP, PRDM1/BLIMP1, HDAC2, TRAIL, and/or DR5 gene may be accomplished, for example, using a BRD9, EZH2, MLL2, MLL3, MLL4, methylcytosine dioxygenase genes (e.g., Tet1, Tet2, Tet3), ATM, CHEK, FBXW10, BCOR, FAT1, ASXL1, PHF6, SF3B1, YY1, CBFb, Runx1, EHMT2 (G9A), SMARCA4, CREBBP, PRDM1/BLIMP1, HDAC2, TRAIL, and/or DR5 gene-targeting gene editing system as described above.

[0290] In one embodiment, the disclosure provides a method, e.g., a method described above, comprising a step of introducing into the cell a gene editing system, e.g., a CRISPR/Cas gene editing system which targets BRD9, EZH2, MLL2, MLL3, MLL4, methylcytosine dioxygenase genes (e.g., Tet1, Tet2, Tet3), ATM, CHEK, FBXW10, BCOR, FAT1, ASXL1, PHF6, SF3B1, YY1, CBFb, Runx1, EHMT2 (G9A), SMARCA4, CREBBP, PRDM1/BLIMP1, HDAC2, TRAIL, and/or DR5, e.g., a CRISPR/Cas system comprising a gRNA which has a targeting sequence complementary to a target sequence of the BRD9, EZH2, MLL2, MLL3, MLL4, methylcytosine dioxygenase genes (e.g., Tet1, Tet2, Tet3), ATM, CHEK, FBXW10, BCOR, FAT1, ASXL1, PHF6, SF3B1, YY1, CBFb, Runx1, EHMT2 (G9A), SMARCA4, CREBBP, PRDM1/BLIMP1, HDAC2, TRAIL, and/or DR5 gene. In embodiments, the CRISPR/Cas system is introduced into said cell as a ribonuclear protein complex of gRNA and Cas enzyme, e.g., is introduced via electroporation. In one embodiment, the method comprises introducing nucleic acid encoding one or more of the components of the CRISPR/Cas system into said cell. In one embodiment, said nucleic acid is disposed on the vector encoding a CAR and/or TCR, e.g., a CAR and/or TCR as described herein.

[0291] In one embodiment, the disclosure provides a method, e.g., a method described above, comprising a step of introducing into the cell an inhibitory dsRNA, e.g., a shRNA or siRNA, which targets BRD9, EZH2, MLL2, MLL3, MLL4, methylcytosine dioxygenase genes (e.g., Tet1, Tet2, Tet3), ATM, CHEK, FBXW10, BCOR, FAT1, ASXL1, PHF6, SF3B1, YY1, CBFb, Runx1, EHMT2 (G9A), SMARCA4, CREBBP, PRDM1/BLIMP1, HDAC2, TRAIL, and/or DR5, e.g., BRD9. In one embodiment, the method comprises introducing into said cell nucleic acid encoding an inhibitory dsRNA, e.g., a shRNA or siRNA, which targets BRD9, EZH2, MLL2, MLL3, MLL4, methylcytosine dioxygenase genes (e.g., Tet1, Tet2, Tet3), ATM, CHEK, FBXW10, BCOR, FAT1, ASXL1, PHF6, SF3B1, YY1, CBFb, Runx1, EHMT2 (G9A), SMARCA4, CREBBP, PRDM1/BLIMP1, HDAC2, TRAIL, and/or DR5, e.g., BRD9. In one embodiment, said nucleic acid is disposed on the vector encoding a CAR and/or TCR, e.g., a CAR and/or TCR as described herein.

[0292] In other embodiments, population of immune effector cells, e.g., T cells, which have, or will be engineered to express a CAR/TCR, can be treated ex vivo by contact with an amount of an BRD9, EZH2, MLL2, MLL3, MLL4, methylcytosine dioxygenase genes (e.g., Tet1, Tet2, Tet3), ATM, CHEK, FBXW10, BCOR, FAT1, ASXL1, PHF6, SF3B1, YY1, CBFb, Runx1, EHMT2 (G9A), SMARCA4, CREBBP, PRDM1/BLIMP1, HDAC2, TRAIL (TNFSF10) and/or Death Receptor 5 (DR5 or TNFRSF10B) inhibitor that improve their efficacy and reduce their side-effects (e.g., CRS) when administered to a subject.

[0293] In one embodiment, a T cell population is deficient in one or more of BRD9, EZH2, MLL2, MLL3, MLL4, methylcytosine dioxygenase genes (e.g., Tet1, Tet2, Tet3), ATM, CHEK, FBXW10, BCOR, FAT1, ASXL1, PHF6, SF3B1, YY1, CBFb, Runx1, EHMT2 (G9A), SMARCA4, CREBBP, PRDM1/BLIMP1, HDAC2, TRAIL (TNFSF10) and/or Death Receptor 5 (DR5 or TNFRSF10B). T cells that are deficient in BRD9, EZH2, MLL2, MLL3, MLL4, methylcytosine dioxygenase genes (e.g., Tet1, Tet2, Tet3), ATM, CHEK, FBXW10, BCOR, FAT1, ASXL1, PHF6, SF3B1, YY1, CBFb, Runx1, EHMT2 (G9A), SMARCA4, CREBBP, PRDM1/BLIMP1, HDAC2, TRAIL (TNFSF10) and/or Death Receptor 5 (DR5 or TNFRSF10B) include cells that do not express the BRD9, EZH2, MLL2, MLL3, MLL4, methylcytosine dioxygenase genes (e.g., Tet1, Tet2, Tet3), ATM, CHEK, FBXW10, BCOR, FAT1, ASXL1, PHF6, SF3B1, YY1, CBFb, Runx1, EHMT2 (G9A), SMARCA4, CREBBP, PRDM1/BLIMP1, HDAC2, TRAIL (TNFSF10) and/or Death Receptor 5 (DR5 or TNFRSF10B) RNA or protein, or have reduced or inhibited BRD9, EZH2, MLL2, MLL3, MLL4, methylcytosine dioxygenase genes (e.g., Tet1, Tet2, Tet3), ATM, CHEK, FBXW10, BCOR, FAT1, ASXL1, PHF6, SF3B1, YY1, CBFb, Runx1, EHMT2 (G9A), SMARCA4, CREBBP, PRDM1/BLIMP1, HDAC2, TRAIL (TNFSF10) and/or Death Receptor 5 (DR5 or TNFRSF10B) activity. BRD9, EZH2, MLL2, MLL3, MLL4, methylcytosine dioxygenase genes (e.g., Tet1, Tet2, Tet3), ATM, CHEK, FBXW10, BCOR, FAT1, ASXL1, PHF6, SF3B1, YY1, CBFb, Runx1, EHMT2 (G9A), SMARCA4, CREBBP, PRDM1/BLIMP1, HDAC2, TRAIL (TNFSF10) and/or Death Receptor 5 (DR5 or TNFRSF10B)-deficient cells can be generated by genetic approaches, e.g., administering RNA-interfering agents, e.g., siRNA, shRNA, miRNA, to reduce or prevent BRD9, EZH2, MLL2, MLL3, MLL4, methylcytosine dioxygenase genes (e.g., Tet1, Tet2, Tet3), ATM, CHEK, FBXW10, BCOR, FAT1, ASXL1, PHF6, SF3B1, YY1, CBFb, Runx1, EHMT2 (G9A), SMARCA4, CREBBP, PRDM1/BLIMP1, HDAC2, TRAIL (TNFSF10) and/or Death Receptor 5 (DR5 or TNFRSF10B) expression. Alternatively, BRD9, EZH2, MLL2, MLL3, MLL4, methylcytosine dioxygenase genes (e.g., Tet1, Tet2, Tet3), ATM, CHEK, FBXW10, BCOR, FAT1, ASXL1, PHF6, SF3B1, YY1, CBFb, Runx1, EHMT2 (G9A), SMARCA4, CREBBP, PRDM1/BLIMP1, HDAC2, TRAIL (TNFSF10) and/or Death Receptor 5 (DR5 or TNFRSF10B)-deficient cells can be generated by treatment with BRD9, EZH2, MLL2, MLL3, MLL4, methylcytosine dioxygenase genes (e.g., Tet1, Tet2, Tet3), ATM, CHEK, FBXW10, BCOR, FAT1, ASXL1, PHF6, SF3B1, YY1, CBFb, Runx1, EHMT2 (G9A), SMARCA4, CREBBP, PRDM1/BLIMP1, HDAC2, TRAIL (TNFSF10) and/or Death Receptor 5 (DR5 or TNFRSF10B) inhibitors described herein.

[0294] The disclosure further provides signaling molecules, such as JAK1, JAK3, STAT5b, STAT3, IL2RG, CARD11 and BRAF and their mutants and methods of use therefore in immune and cell therapy. In particular, the disclosure provides immune effector cellular therapy products, e.g., CAR- and TCR-expressing T cells, comprising JAK1, JAK3, STAT5b, STAT3, IL2RG, CARD11 and BRAF and their mutants, and use of JAK1, JAK3, STAT5b, STAT3, IL2RG, CARD11 and BRAF and their mutants in connection with immune effector cell therapy products, e.g., CAR-T and TCR-T cells. JAK1, JAK3, STAT5b, STAT3, IL2RG, CARD11 and BRAF and their mutants of the disclosure, together with their methods of use, are described in more detail below. CARs, CAR T and TCR-T cells, and methods of use are further described below.

[0295] In some embodiments, the signaling molecule may elicit one or more of the following effects in an immune cell containing said construct or constructs:

[0296] a) enhances the proliferation of such immune effector cell

[0297] b) Modulate (increase or decrease) cytokine secretion by immune effector cell

[0298] c) Decrease the dependence on exogenous cytokines for survival and proliferation

[0299] d) enhance cytotoxicity of immune effector cell

[0300] e) enhance the survival of immune effector cell

[0301] f) block apoptosis of immune cells

[0302] g) Delay senescence of immune cells

[0303] h) Delay exhaustion of immune cells

[0304] i) Enhance the persistence of immune cells in vivo when administered to patients

[0305] j) Enhance the efficacy of immune cells in vivo when administered to patients

[0306] In some embodiments, the signaling molecule may be selected from JAK1, JAK3, STAT5b, STAT3, IL2RG, CARD11, BRAF, CD27 (TNFRSF7, Gene ID: 939), CD28 (Gene ID: 940), 41BB (TNFRSF9, CD137; Gene ID: 3604), OX40 (TNFRSF4, Gene ID: 7293), DcR2 (TNFRSF10D, Gene ID: 8793), DcR1 (TNFRSF10C, Gene ID: 8794), BCMA (TNFRSF17, Gene ID: 608), and GITR (TNFRSF18; Gene ID: 8784) or a mutated form of any one of the foregoing.

[0307] In some embodiments, the signaling molecule may comprise a TRAIL binding domain, e.g., ectodomain (extracellular domain) of DR5 (SEQ ID NO: 2392); ectodomain of DR4 (SEQ ID NO; 2386), ectodomain of DcR1 (SEQ ID NO: 2375) or ectodomain of DcR1 (SEQ ID NO: 2380). In certain embodiments, the protein comprising the TRAIL binding domain may be joined via a transmembrane domain to an intracellular signaling domain. In some embodiments, the intracellular signaling domains comprise of signaling domains of CD27, CD28, 41BB, BCMA, GITR and OX40. Table 1 lists several exemplary cytoplasmic (CP) signaling domains and several exemplary fusion proteins containing the extracellular TRAIL binding domains and cytoplasmic signaling domains.

[0308] In some embodiments, the signaling molecule may be JAK1(SEQ ID NO: 374 and SEQ ID NO:1804), or a homologue or orthologue thereof.

[0309] In some embodiments, the signaling molecule may be a mutated form of JAK1, or a homologue or orthologue thereof, optionally wherein the mutation:
[0310] i) results in altered signaling as compared to wild-type JAK1(e.g., phosphorylation of STATs)
[0311] ii) results in constitutive active signaling
   [0312] Exemplary amino acids that can be mutated in JAK1 include one or more of the amino acids V658 and/or S703
   [0313] Exemplary amino acids substitutions in JAK1 that result in altered signaling include V658F (SEQ ID NO: 375) and S7031 (SEQ ID NO: 376)
[0314] iii) results in nucleic acid sequence that encodes an amino acid sequence having at least 80%, at least 85%, at least 90%, at least 95%, at least 98%, at least 99%, or 100% identity to the amino acid sequence of SEQ ID NO: 1804, 1805 or 1806;

[0315] In some embodiments, the signaling molecule may be a mutated form of JAK3, or a homologue or orthologue thereof, optionally wherein the mutation
[0316] i) results in altered signaling as compared to wild-type JAK3 (e.g., phosphorylation of STATs)
[0317] ii) results in constitutive active signaling
   [0318] Exemplary amino acids that can be mutated in JAK3 (DNA SEQ ID NO: 360 and protein SEQ ID NO: 1790) to result in altered signaling include one or more of M511, A573, R657, Q507, G491, V674 and V678.
   [0319] Exemplary amino acids substitutions in JAK3 (DNA SEQ ID NO: 360 and protein SEQ ID NO: 1790) that result in altered signaling include one or more of M511, A573, R657, Q507, G491, V674, V678M511I, A573V, R657W, Q507P, G491S, V674A, V678L
[0320] iii) nucleic acid sequence that encodes an amino acid sequence having at least 80%, at least 85%, at least 90%, at least 95%, at least 98%, at least 99%, or 100% identity to the amino acid sequence of SEQ ID NO:1790-1797.
   [0321] In some embodiments, the signaling molecule may be Stat5b (NM 012448.3; SEQ ID NO: 368), or a homologue or orthologue thereof.

[0322] In some embodiments, the signaling molecule may be a mutated form of Stat5b, or a homologue or orthologue thereof, optionally wherein the mutation:
[0323] i) results in altered signaling as compared to wild-type Stat5b
[0324] ii) results in constitutive active signaling
   [0325] Exemplary amino acids that can be mutated in Stat5b (DNA SEQ ID NO: 368 and protein SEQ ID NO: 1798) to result in altered signaling include one or more of T628, N642, Y665, Q706, R659, 1704, E579.
   [0326] Exemplary amino acids substitutions in Stat5b (DNA SEQ ID NO: 368 and protein SEQ ID NO: 1798) that result in altered signaling include one or more of T628S (SEQ ID NO: 1799), N642H (SEQ ID NO: 1800), Y665F (SEQ ID NO: 1801), Q706L (SEQ ID NO: 1802), R659C (SEQ ID NO: 1803), 1704L and E579K.
[0327] iii) nucleic acid sequence that encodes an amino acid sequence having at least 80%, at least 85%, at least 90%, at least 95%, at least 98%, at least 99%, or 100% identity to the amino acid sequence of SEQ ID NO: 1798-1803.

[0328] In some embodiments, the signaling molecule may be Stat3, or a homologue or orthologue thereof.

[0329] In some embodiments, the signaling molecule may be a mutated form of Stat3, or a homologue or orthologue thereof, optionally wherein the mutation:
[0330] i) results in altered signaling as compared to wild-type Stat3
[0331] ii) results in constitutive active signaling
   [0332] Exemplary amino acids that can be mutated in Stat3 (DNA SEQ ID NO: 380 and protein SEQ ID NO: 1810) to result in altered signaling include one or more of D661, Y640, A702, S614 and G618.
   [0333] Exemplary amino acids substitutions in Stat3 (DNA SEQ ID NO: 380 and protein SEQ ID NO: 1810) that result in altered signaling include one or more of D661Y (SEQ ID NO: 1811), Y640F (SEQ ID NO: 1812), A702T (SEQ ID NO: 1813), S614R (SEQ ID NO: 1814) and G618R (SEQ ID NO: 1815).
[0334] iii) nucleic acid sequence that encodes an amino acid sequence having at least 80%, at least 85%, at least 90%, at least 95%, at least 98%, at least 99%, or 100% identity to the amino acid sequence of SEQ ID NO:1810-1815.

[0335] In some embodiments, the signaling molecule may be BRAF (e.g., NM_004333.4), or a homologue or orthologue thereof.

[0336] In some embodiments, the signaling molecule may be a mutated form of BRAF, or a homologue or orthologue thereof, optionally wherein the mutation:
[0337] i) results in altered signaling as compared to wild-type BRAF (provide examples)
[0338] ii) results in constitutive active signaling
   [0339] Exemplary amino acids that can be mutated in BRAF (DNA SEQ ID NO: 388 and protein SEQ ID NO: 1818) to result in altered signaling include one or more of V600, K601 and E586.
   [0340] Exemplary amino acids substitutions in BRAF (DNA SEQ ID NO: 388) and protein SEQ ID NO: 1818) that result in altered signaling include one or more of V600E (SEQ ID NO: 1819), V600D, V600K, V600R, V600 any, K601E, K601 any, E586K.
[0341] iii) nucleic acid sequence that encodes an amino acid sequence having at least 80%, at least 85%, at least 90%, at least 95%, at least 98%, at least 99%, or 100% identity to the amino acid sequence of SEQ ID NO: 1818-1819.

[0342] In some embodiments, the signaling molecule may be CARD11 (e.g.,), or a homologue or orthologue thereof.

[0343] In some embodiments, the signaling molecule may be a mutated form of CARD11, or a homologue or orthologue thereof, optionally wherein the mutation:
[0344] i) results in altered signaling as compared to wild-type CARD11
[0345] ii) results in constitutive active signaling
   [0346] Exemplary amino acids that can be mutated in CARD11 (DNA SEQ ID NO: 377 and protein SEQ ID NO: 1807) to result in altered signaling include one or more of S615 and E626.
   [0347] Exemplary amino acids substitutions in CARD11 (DNA SEQ ID NO: 377 and protein SEQ ID NO: 1807) to result in altered signaling include one or more of S615F (SEQ ID NO: 1808) and E626K (SEQ ID NO: 1809).
[0348] iii) nucleic acid sequence that encodes an amino acid sequence having at least 80%, at least 85%, at least 90%, at least 95%, at least 98%, at least 99%, or 100% identity to the amino acid sequence of SEQ ID NO: 1807-1809, or amino acid sequence having at least 80%, at least 85%, at least 90%, at least 95%, at least 98%, at least 99%, or 100% identity to the amino acid sequence by SEQ ID NO: 1807-1809;
   wherein the foregoing mutations are indicated with respect to the human sequences, but are intended to further include corresponding or analogous mutations to the homologous or orthologous residues or domains of a homologue or orthologue, e.g., mouse JAK1, JAK3, STAT5b, BRAF or CARD11.

[0349] In some embodiments, the T cells ectopically express or over-express wild-type or mutant form of one or more genes from the group of JAK1(SEQ ID NO: 371-374), JAK3 (SEQ ID NO: 360-367), STAT5b (SEQ ID NO:368-373), STAT3 (SEQ ID NO: 380-385), IL2RG (SEQ ID NO: 386-387), CARD11 (SEQ ID NO: 377-379), BRAF (SEQ ID NO: 388-389), CD27 (TNFRSF7, Gene ID: 939), CD28 (Gene ID: 940), 41BB (TNFRSF9, CD137; Gene ID: 3604), OX40 (TNFRSF4, Gene ID: 7293), DcR2 (TNFRSF10D, Gene ID: 8793), DcR1 (TNFRSF10C, Gene ID: 8794), BCMA (TNFRSF17, Gene ID: 608), and GITR (TNFRSF18; Gene ID: 8784). T cells ectopically expressing the wild-type and mutant forms of the above genes can be generated using methods described herein, e.g., using lentiviral mediated gene transfer or transfection of DNA or RNA encoding the corresponding gene.

[0350] The disclosure further provides a vector comprising sequence encoding the wild type or constitutive active mutant form of JAK1, JAK3, STAT5b, STAT3, IL2RG, CARD11, BRAF, CD28, 41BB, OX40, DcR2, DcR1, BCMA, and/or GITR genes or a TRAIL antagonist.

[0351] In some embodiments, the expression of the nucleic acid encoding the wild type or constitutive active mutant form of JAK1, JAK3, STAT5b, STAT3, IL2RG, CARD11, BRAF, CD28, 41BB, OX40, DcR2, DcR1, BCMA, and/or GITR genes or a TRAIL antagonist may be regulated by constitutive or inducible promoters.

[0352] The disclosure further provides a vector comprising sequence encoding an immune receptor and sequence encoding a wild-type or constitutive active mutant of JAK1, JAK3, STAT5b, STAT3, IL2RG, CARD11, and/or BRAF and/or a wild-type and/or mutant of CD28, 41BB, OX40, DcR2, DcR1, BCMA, and GITR genes.

[0353] In one embodiment, the sequence encoding an immune receptor and sequence encoding a wild-type or constitutive active mutant of JAK1, JAK3, STAT5b, STAT3, IL2RG, CARD11, and/or BRAF and/or a wild-type and/or mutant of CD28, 41BB, OX40, DcR2, DcR1, BCMA, and GITR genes are separated by a 2A sequence. Several exemplary nucleic acids sequences encoding a CAR/TCR, a 2A sequence and a constitutive active mutant of JAK1, JAK3, STAT5b, STAT3, IL2RG, CARD11 and BRAF are represented by SEQ ID Nos; 484 to 499.

[0354] These nucleic acid sequences can be cloned in a suitable vector, e.g., vector described herein, for expression in immune cells. Vectors encoding other CARs/TCRs and wild type and mutants of JAK1, JAK3, STAT5b, STAT3, IL2RG, CARD11, and/or BRAF and/or a wild-type and/or mutant of CD28, 41BB, OX40, DcR2, DcR1, BCMA, and GITR genes can be constructed similarly.

[0355] The disclosure further provides a vector comprising a sequence encoding an immune receptor and sequence encoding a TRAIL antagonist. Several exemplary nucleic acids sequences encoding a CAR/TCR, a 2A sequence and a TRAIL antagonist are represented by SEQ ID Nos; 2853- to 2863, 2865-2875, 2877-2887, 2889-2899, 2901-2911, 2913-2923, 2925-2935. The disclosure further provides a vector comprising a sequence encoding a TRAIL antagonist that can be used to genetically modify an immune cell, e.g., an immune effector cell.

[0356] The disclosure further provides a vector comprising a sequence encoding an immune receptor and sequence encoding a mutant form of TRAIL receptors DR5, DR4, DcR1 and DcR2. The disclosure further provides a vector comprising a sequence encoding a fusion protein of TRAIL receptors DR5 (SEQ ID NO: 2318-2330), DR4 (SEQ ID NO: 2331-2337), DcR1 (SEQ ID NO: 2338-2344) and DcR2 (SEQ ID NO: 2345-2351) that can be used to genetically modify an immune cell, e.g., an effector cell, so as to block or alter the activity of physiological TRAIL receptors.

[0357] In some embodiments, the nucleic acid encoding the CAR/TCR and the nucleic acid encoding the a wild-type or constitutive active mutant form of JAK1, JAK3, STAT5b, STAT3, IL2RG, CARD11, BRAF, CD28, 41BB, OX40, DcR2, DcR1, BCMA, and/or GITR genes or a TRAIL antagonist may be on the same vector.

[0358] In some embodiments, the nucleic acid encoding the CAR/TCR and the nucleic acid encoding the wild type or constitutive active mutant form of JAK1, JAK3, STAT5b, STAT3, IL2RG, CARD11, BRAF, CD28, 41BB, OX40, DcR2, DcR1, BCMA, and/or GITR genes or a TRAIL antagonist may be on different vectors.

[0359] In some embodiments, the expression of the nucleic acid encoding the CAR/TCR and the nucleic acid encoding the wild type or constitutive active mutant form of JAK1, JAK3, STAT5b, STAT3, IL2RG, CARD11, BRAF, CD28, 41BB, OX40, DcR2, DcR1, BCMA, and/or GITR genes or a TRAIL antagonist may be regulated by different constitutive or inducible promoters.

[0360] In some embodiments, the expression of the nucleic acid encoding the CAR/TCR and the nucleic acid encoding the wild-type or constitutive active mutant form of JAK1, JAK3, STAT5b, STAT3, IL2RG, CARD11, BRAF, CD28, 41BB, OX40, DcR2, DcR1, BCMA, and/or GITR genes or a TRAIL antagonist may be regulated by the same constitutive or inducible promoter.

[0361] In some embodiments, the present disclosure provides cells expressing an immune receptor (e.g., a CAR, SIR, TFP, Ab-TCR or TCR) and ectopically expressing or over-expressing wild-type or mutant form of one or more genes from the group of JAK1, JAK3, STAT5b, STAT3, IL2RG, CARD11, and/or BRAF and/or a wild-type and/or mutant of CD28, 41BB, OX40, DcR2, DcR1, BCMA, and GITR.

[0362] In some embodiments, the cells of the disclosure comprise an immune receptor (e.g., a CAR, SIR, TFP, Ab-TCR or TCR), and a mutant form of one or more genes from the group of JAK1, JAK3, STAT5b, STAT3, IL2RG, CARD11, and/or BRAF. In some embodiments, the cells of the disclosure comprise an immune receptor (e.g., a CAR, SIR, TFP, Ab-TCR or TCR), and ectopically express or over-express one of more genes from the group of CD27, CD28, 41BB, OX40, DcR2, DcR1, BCMA, and GITR. In some embodiments, the immune cells, e.g., immune effector cells, also co-express an inhibitor of BRD9, EZH2, MLL2, MLL3, MLL4, methylcytosine dioxygenase genes (e.g., Tet1, Tet2, Tet3), ATM, CHEK, FBXW10, BCOR, FAT1, ASXL1, PHF6, SF3B1, YY1, CBFb, Runx1, EHMT2 (G9A), SMARCA4, CREBBP, PRDM1/BLIMP1, HDAC2, TRAIL, and/or DR5.

[0363] In one aspect, the disclosure provides a method of altering the phenotype, differentiation state and/or therapeutic efficacy of an immune cell, e.g., immune receptor-expressing cell, e.g., a cell of any of the previous claims, e.g., a CAR19-expressing cell, comprising a step of increasing the expression and/or activity of JAK1, JAK3, STAT5b, STAT3, IL2RG, CARD11, BRAF, CD27, CD28, 41BB, OX40, DcR2, DcR1, BCMA, and GITR in said cell. In some embodiments, said step comprises expressing in said cells a wild-type or constitutive active mutant of JAK1, JAK3, STAT5b, STAT3, IL2RG, CARD11, and BRAF. In some embodiments, said step comprises expressing in said cells a wild-type or mutant of CD28, 41BB, OX40, DcR2, DcR1, BCMA, and GITR.

[0364] In some embodiments, the wild-type and/or constitutive active mutants of JAK1, JAK3, STAT5b, STAT3, IL2RG, CARD11, BRAF, CD28, 41BB, OX40, DcR2, DcR1, BCMA, and GITR of the present disclosure are expressed in the cells 1) ectopically by introduction of nucleic acid sequences (DNA or mRNA) encoding their wild-type or constitutive active mutants; 2) by altering the endogenous allele or alleles using homologous recombination at the genomic locus. In some embodiments, the immune cells, e.g., immune effector cells, also co-express an inhibitor of BRD9, EZH2, MLL2, MLL3, MLL4, methylcytosine dioxygenase genes (e.g., Tet1, Tet2, Tet3), ATM, CHEK, FBXW10, BCOR, FAT1, ASXL1, PHF6, SF3B1, YY1, CBFb, Runx1, EHMT2 (G9A), SMARCA4, CREBBP, PRDM1/BLIMP1, HDAC2, TRAIL, and/or DR5.

[0365] In one aspect, the disclosure provides a method of increasing the diversity of immune receptor-expressing cell, e.g., cells of any of the previous claims, e.g., CAR19-expressing cells, comprising a step of altering the expression and/or activity of JAK1, JAK3, STAT5b, STAT3, IL2RG, CARD11, BRAF, CD27, CD28, 41BB, OX40, DcR2, DcR1, BCMA, and GITR in said cell. In some embodiments, said step comprises expressing in said cells a wild-type or constitutive active mutant of JAK1, JAK3, STAT5b, STAT3, IL2RG, CARD11, and BRAF. In some embodiments, said step comprises expressing in said cells a wild-type or mutant of CD28, 41BB, OX40, DcR2, DcR1, BCMA, and GITR.

[0366] In some embodiments, the wild-type and/or constitutive active mutants of JAK1, JAK3, STAT5b, STAT3, IL2RG, CARD11, BRAF, CD28, 41BB, OX40, DcR2, DcR1, BCMA, and GITR of the present disclosure are expressed in the cells 1) ectopically by introduction of nucletic acid sequences (DNA or mRNA) encoding their wild-type or constitutive active mutants; 2) by altering the endogenous allele or alleles using homologous recombination at the genomic locus. In some embodiments, the immune effector cells also co-express an inhibitor of BRD9, EZH2, MLL2, MLL3, MLL4, methylcytosine dioxygenase genes (e.g., Tet1, Tet2, Tet3), ATM, CHEK, FBXW10, BCOR, FAT1, ASXL1, PHF6, SF3B1, YY1, CBFb, Runx1, EHMT2 (G9A), SMARCA4, CREBBP, PRDM1/BLIMP1, HDAC2, TRAIL, and/or DR5.

[0367] In some embodiments, the genetic and/or chemical inhibitors of BRD9, EZH2, MLL2, MLL3, MLL4, methylcytosine dioxygenase genes (e.g., Tet1, Tet2, Tet3), ATM, CHEK, FBXW10, BCOR, FAT1, ASXL1, PHF6, SF3B1, YY1, CBFb, Runx1, EHMT2 (G9A), SMARCA4, CREBBP, PRDM1/BLIMP1, HDAC2, TRAIL, and/or DR5, and/or signaling molecule JAK1, JAK3, STAT5b, STAT3, IL2RG, CARD11, and/or BRAF and/or a wild-type and/or mutant of CD28, 41BB, OX40, DcR2, DcR1, BCMA, and GITR may elicit one or more of the following effects in an immune cell:
[0368] 1. enhances the proliferation of such immune effector cell
[0369] 2. Alter cytokine secretion by immune effector cell
[0370] 3. Decrease the dependence on exogenous cytokines for survival and proliferation
[0371] 4. enhance cytotoxicity of immune effector cell
[0372] 5. enhance the survival of immune effector cell
[0373] 6. block apoptosis of immune cells
[0374] 7. Delay senescence of immune cells
[0375] 8. Delay exhaustion of immune cells
[0376] 9. Enhance the persistence of immune cells in vivo when administered to patients
[0377] 10. Enhance the efficacy of immune cells in vivo when administered to patients
[0378] 11. Enhance the penetration of immune cells into diseased organs or tissues (e.g., tumor)
[0379] 12. Prevent or ameliorate the toxicity, e.g., CRS and neurotoxicity, caused by administration of immune cells

[0380] In one aspect, the disclosure provides a method of treating a subject in need thereof, comprising administering to said subject an effective amount of the cells as described herein, e.g., immune cells, e.g., immune effector cells (e.g., T cell or NK cell) comprising an immune receptor, and co-expressing constitutive active mutants of JAK1, JAK3, STAT5b, STAT3, IL2RG, CARD11, and/or BRAF and/or a wild-type and/or mutant of CD28, 41BB, OX40, DcR2, DcR1, BCMA, and GITR.

[0381] In one aspects, the disclosure provides a method of treating a subject in need thereof, comprising administering to said subject an effective amount of the cells as described herein, e.g., immune effector cells (e.g., T cell or NK cell) comprising an immune receptor, and co-expressing constitutive active mutants of JAK1, JAK3, STAT5b, STAT3, IL2RG, CARD11, and/or BRAF and/or a wild-type and/or mutant of CD28, 41BB, OX40, DcR2, DcR1, BCMA, and GITR, and optionally, administering to said subject an inhibitor of BRD9, EZH2, MLL2, MLL3, MLL4, methylcytosine dioxygenase genes (e.g., Tet1, Tet2, Tet3), ATM, CHEK, FBXW10, BCOR, FAT1, ASXL1, PHF6, SF3B1, YY1, CBFb, Runx1, EHMT2 (G9A), SMARCA4, CREBBP, PRDM1/BLIMP1, HDAC2, TRAIL, and/or DR5.

[0382] In some embodiment, the subject receives a pre-treatment with the inhibitor of BRD9, EZH2, MLL2, MLL3, MLL4, methylcytosine dioxygenase genes (e.g., Tet1, Tet2, Tet3), ATM, CHEK, FBXW10, BCOR, FAT1, ASXL1, PHF6, SF3B1, YY1, CBFb, Runx1, EHMT2 (G9A), SMARCA4, CREBBP, PRDM1/BLIMP1, HDAC2, TRAIL, and/or DR5 prior to the initiation of the immune- and/or cell therapy comprising constitutive active mutants of JAK1, JAK3, STAT5b, STAT3, IL2RG, CARD11, and/or BRAF and/or a wild-type and/or mutant of CD28, 41BB, OX40, DcR2, DcR1, BCMA, and GITR. In some embodiments, the subject receives concurrent treatment with an inhibitor of BRD9, EZH2, MLL2, MLL3, MLL4, methylcytosine dioxygenase genes (e.g., Tet1, Tet2, Tet3), ATM, CHEK, FBXW10, BCOR, FAT1, ASXL1, PHF6, SF3B1, YY1, CBFb, Runx1, EHMT2 (G9A), SMARCA4, CREBBP, PRDM1/BLIMP1, HDAC2, TRAIL, and/or DR5 and the immune- and/or cell-therapy. In some embodiments, the subject receives treatment with an inhibitor of BRD9, EZH2, MLL2, MLL3, MLL4, methylcytosine dioxygenase genes (e.g., Tet1, Tet2, Tet3), ATM, CHEK, FBXW10, BCOR, FAT1, ASXL1, PHF6, SF3B1, YY1, CBFb, Runx1, EHMT2 (G9A), SMARCA4, CREBBP, PRDM1/BLIMP1, HDAC2, TRAIL, and/or DR5 following the administration of immune- and/or cell-therapy.

[0383] Provided herein are compositions of matter and methods of use for the treatment of a disease such as cancer and immune disorders using cell therapy products (e.g., T cells, NK cells) engineered with a chimeric antigen receptor (CAR) or a native or natural TCR. In some embodiments, the cell is engineered to express a CAR. The disclosure is not limited by the type CAR. The CARs as described herein covers both the 2^{nd} generation CARs and next generation CARs (e.g., SIRs, zSIRs, Ab-TCRs and TFP) as described in PCT/US2017/024843, WO 2014/160030 A2, WO 2016/187349 A1, PCT/US2016/058305 and PCT/US17/64379, which are incorporated herein by reference in their entirety. It is to be noted that similar composition of matters and methods of use can be used for the treatment of diseases such as cancer and immune disorder using other immune effector cells (e.g., T cells), such as Tumor Infilterating Lymphocytes (TILs) or T cells engineered with recombinant TCRs.

[0384] Sequences of some examples of various components of CARs (conventional and next generation CARs) of the instant disclosure is listed in Table 7a. The Table 7a also lists the DNA and Protein SEQ ID Nos of several exemplary conventional CARs and next generation CARs. Finally, the Table 7a lists the DNA and Protein SEQ ID NOs of several exemplary conventional CARs, next generation CARs and TCRs that also encode an accessory module comprising a signaling protein. For exemple, the construct CD8SP-FMC63-(vL-vH)-Myc-BBz-T2A-JAK3-M511I represented by SEQ ID NO (DNA): 484 and SEQ ID NO (PRT): 1911, respectively, is a second generation CAR that comprises a CD8 signal peptide, a scFv fragment derived from FMC63 monoclonal antibody targeting CD19, a Myc epitope tag, a 41BB costimulatory domain, a CD3z signaling domain, a T2A cleavage site and a JAK3-M511I mutant. The constructs represented by DNA SEQ ID NOs: 485-490 and PRT SEQ ID NO: 1912-1917, respectively, are similar in design with the exception that the JAK3-M511I module is replaced by JAK3-A573V, STAT5b-T658F, JAK1-V658F, CARD11-S615F, STAT3-Y640F and BRAF-V600E, respectively. The construct CD8SP-FMC63-vL-V5-[hTCRb-KACIAH]-F-P2A-SP-FMC63-vH-Myc-[hTCRa-CSDVP]-F-F2A-JAK3-M511I (SEQ ID NO: 491 and 1918) is a double chain SIR (Synthetic Immune Receptor) targeting CD19 and co-expressing JAK-M511I. The construct CD8SP-FMC63-(vL-vH)-Myc-z-P2A-JAK3-M511I (SEQ ID NO: 492 and 1919) is a first generation CAR coexpressing JAK3-M511I. The constructs represented by SEQ ID NO: 493-496 are TFPs targeting CD19 and co-expressing JAK3-M511I. The constructs CD8SP-FMC63-vL-[IgCL-TCRb-IAH-6MD]-F-P2A-SP-FMC63-vH-[IgG1-CH1-TCRa-SDVP-6MD]-F-F2A-JAK3-M511I (SEQ ID NO: 497 and 1924) and CD8SP-FMC63-vL-[IgCL-TCRg-6MD]-F-P2A-SP-FMC63-vH-[IgGI-CH1-TCRd-6MD]-F-F2A-JAK3-M511I (SEQ ID NO: 498 and 1925) are two Antibody-TCR (Ab-TCR) targeting CD19 and co-expressing JAK3-M511I. The construct NY-ESO-TCRa—F-P2A-NYESO-[hTCRb]-F-F2A-JAK3-M511I (SEQ ID NO: 499 and 1926) is a recombinant TCR targeting NY-ESO/HLA-A2 complex and co-expressing M511I. Table 7a also lists the SEQ ID Nos of several exemplary CARs, next generation CARs and TCRs expressing different TRAIL antagonists, e.g., DR5-Fc and DR5-fusion proteins. The above constructs represent exemplary constructs. The accessory module M511I can be replaced by other accessory modules of the disclosure listed in Table 1 by methods known in the art. Similarly, the CD19 antigen binding domains (e.g., FMC63 scFv) can be replaced by antigen binding domains targeting other antigens by methods known in the art. The patent applications PCT/US2017/024843, WO 2014/160030 A2, WO 2016/187349 A1, PCT/US2016/058305 and PCI/US17/64379 describe conventional and next generation CARs targeting several antigens.

TABLE 7a
Nucleic acid and Protein SEQ ID of conventional and next
generation CAR and CAR components

| | SEQ ID | SEQ ID |
|---|---|---|
| | (DNA) | (PRT) |
| CD8_Signal_Peptide | 407 | 1834 |
| IgH_Signal_Peptide | 408 | 1835 |
| FMC63-vL | 409 | 1836 |
| CD20-2F2-vL | 410 | 1837 |
| (GGGGS) x3_LINKER | 411 | 1838 |
| FMC63-vH | 412 | 1839 |
| CD20-2F2-vH | 413 | 1840 |
| FMC63-(vL-vH) | 414 | 1841 |
| CD20-2F2-(vL-vH) | 415 | 1842 |
| Myc-TAG | 416 | 1843 |
| V5-TAG | 417 | 1844 |
| F2A | 418 | 1845 |
| T2A | 419 | 1846 |
| T2A | 420 | 1847 |
| P2A | 421 | 1848 |
| P2a-variant | 422 | 1849 |
| E2A | 423 | 1850 |
| SGSG | 424 | 1851 |
| SGSG | 425 | 1852 |
| FURINE CLEAVAGE SITE | 426 | 1853 |
| hCD8-Hinge-TM | 427 | 1854 |
| hCD8-Hinge-TM-BBz | 428 | 1855 |
| hCD8TM-Hinge-BB | 429 | 1856 |
| 4-1BB-cytosolic-domain | 430 | 1857 |
| CD3z-cytosolic-domain | 431 | 1858 |
| CD3z-cytosolic-domain | 432 | 1859 |
| CD28-Hinge-TM-cytosolic-domain | 433 | 1860 |
| LAILR1-TM-CP | 434 | 1861 |
| CD3d-ECDTMCP-opt2 | 435 | 1862 |
| CD3d-ECDTMCP-opt | 436 | 1863 |
| CD3eECDTM-opt2 | 437 | 1864 |
| CD3e-CP-opt2 | 438 | 1865 |
| CD3eECDTMCP-opt2 | 439 | 1866 |
| CD3g-ECDTMCP-opt2 | 440 | 1867 |
| CD3g-ECDTMCP-opt | 441 | 1868 |
| CD3e-ECDTM-opt | 442 | 1869 |
| CD3e-CP-opt | 443 | 1870 |
| CD3e-ECDTMCP-opt | 444 | 1871 |
| CD3zECDTM-opt | 445 | 1872 |
| CD3z-CP-opt | 446 | 1873 |
| CD3zECDTM-opt2 | 447 | 1874 |
| CD3z-CP-opt2 | 448 | 1875 |
| CD3zECDTMCP-opt2 | 449 | 1876 |
| IgCL-TCRg-6MD | 450 | 1877 |
| IgCL-TCRb-IAH-6MD | 451 | 1878 |
| IgCL-TCRb-wt2-opt-6MD | 452 | 1879 |
| IgG1-CH1-TCRd-6MD | 453 | 1880 |
| IgG1-CH1-TCRa-SDVP-6MD | 454 | 1881 |
| IgG1-CH1-TCRa-wt2-opt-6MD | 455 | 1882 |
| hTCR-alpha-constant_X02883.1 | 456 | 1883 |
| hTCRa-WT | 457 | 1884 |
| hTCRa-CSDVP | 458 | 1885 |
| hTCRa-T48C-opt | 459 | 1886 |
| hTCRaECD-CD3zECDTMCP-opt2 | 460 | 1887 |
| hTCR-b1-constant-region_X00437.1 | 461 | 1888 |
| hTCR-b2-constant region_L34740 | 462 | 1889 |
| hTCRb-WT | 463 | 1890 |
| hTCRb-S57C-opt1 | 464 | 1891 |
| hTCRb-KACIAH | 465 | 1892 |
| hTCRbECD-CD3zECDTMCP-opt | 466 | 1893 |
| preTCRa_gb_U38996.1 | 467 | 1894 |
| preTCRa | 468 | 1895 |
| preTCRa-de148 | 469 | 1896 |
| hTCR-gamma_M27331.1 | 470 | 1897 |
| hTCR-Gamma-Opt | 471 | 1898 |
| hTCR-Delta | 472 | 1899 |
| hTCR-Delta-Opt | 473 | 1900 |
| PuroR_Variant (PAC) | 474 | 1901 |
| BlastR | 475 | 1902 |
| CD8SP-FMC63-(vL-vH)-Myc-CD28z-T2A-PAC | 476 | 1903 |
| CD8SP-FMC63-(vL-vH)-Myc-BBz-T2A-PAC | 477 | 1904 |
| CD8SP-CD20-2F2-(vL-vH)-Myc-BBz-T2A- | 478 | 1905 |
| PAC | | |
| CD8SP-FMC63-vL-V5-[hTCRb-KACIAH]-F- | 479 | 1906 |
| P2A-SP-FMC63-vH-Myc-[hTCRa-CSDVP]-F- | | |
| F2A-PAC | | |
| CD8SP-CD20-2F2-vL-V5-[hTCRb-KACIAH]- | 480 | 1907 |
| F-P2A-SP-CD20-2F2-vH-Myc-[hTCRa- | | |
| CSDVP]-F-F2A-PAC | | |
| CD8SP-FMC63-(vL-vH)-Myc-z-P2A-K13- | 481 | 1908 |
| Flag-T2A-PAC | | |
| CD8SP-CD20-2F2-(vL-vH)-Myc-z-P2A-K13- | 482 | 1909 |
| Flag-T2A-PAC | | |
| Streptag | 483 | 1910 |
| CD8SP-FMC63-(vL-vH)-Myc-BBz-T2A-JAK3- | 484 | 1911 |
| M511I | | |
| CD8SP-FMC63-(vL-vH)-Myc-BBz-T2A-JAK3- | 485 | 1912 |
| A573V | | |
| CD8SP-FMC63-(vL-vH)-Myc-BBz-T2A- | 486 | 1913 |
| Stat5b-T628S | | |
| CD8SP-FMC63-(vL-vH)-Myc-BBz-T2A-JAK1- | 487 | 1914 |
| V658F | | |
| CD8SP-FMC63-(vL-vH)-Myc-BBz-T2A- | 488 | 1915 |
| CARD11-S615F | | |
| CD8SP-FMC63-(vL-vH)-Myc-BBz-T2A- | 489 | 1916 |
| STAT3-Y640F | | |
| CD8SP-FMC63-(vL-vH)-Myc-BBz-T2A-BRAF- | 490 | 1917 |
| V600E | | |
| CD8SP-FMC63-vL-V5-[hTCRb-KACIAH]-F- | 491 | 1918 |
| P2A-SP-FMC63-vH-Myc-[hTCRa-CSDVP]-F- | | |
| F2A-JAK3-M511I | | |
| CD8SP-FMC63-(vL-vH)-Myc-z-P2A-JAK3- | 492 | 1919 |
| M511I | | |
| CD8SP-FMC63-(vL-vH)-CD3e-ECDTMCP- | 493 | 1920 |
| opt2-P2A-JAK3-M511I | | |
| CD8SP-FMC63-(vL-vH)-CD3d-ECDTMCP- | 494 | 1921 |
| opt2-P2A-JAK3-M511I | | |
| CD8SP-FMC63-(vL-vH)-CD3g-ECDTMCP- | 495 | 1922 |
| opt2-P2A-JAK3-M511I | | |
| CD8SP-FMC63-(vL-vH)-CD3z-ECDTMCP- | 496 | 1923 |
| opt2-P2A-JAK3-M511I | | |
| CD8SP-FMC63-vL-[IgCL-TCRb-IAH-6MD]-F- | 497 | 1924 |
| P2A-SP-FMC63-vH-[IgG1-CH1-TCRa-SDVP- | | |
| 6MD]-F-F2A-JAK3-M511I | | |
| CD8SP-FMC63-vL-[IgCL-TCRg-6MD]-F-P2A- | 498 | 1925 |
| SP-FMC63-vH-[IgG1-CH1-TCRd-6MD]-F- | | |
| F2A-JAK3-M511I | | |
| NY-ESO-TCRa-F-P2A-NYESO-[hTCRb]-F- | 499 | 1926 |
| F2A-JAK3-M511I | | |
| CD8SP-FMC63-(vL-vH)-Myc-BBz-T2A-DR5- | 2853 | 2945 |
| Fc | | |
| CD8SP-FMC63-vL-V5-[hTCRb-KACIAH]-F- | 2854 | 2946 |
| P2A-SP-FMC63-vH-Myc-[hTCRa-CSDVP]-F- | | |
| F2A-DR5-Fc | | |
| CD8SP-FMC63-(vL-vH)-Myc-z-P2A-DR5-Fc | 2855 | 2947 |
| CD8SP-FMC63-(vL-vH)-CD3e-ECDTMCP- | 2856 | 2948 |
| opt2-P2A-DR5-Fc | | |
| CD8SP-FMC63-(vL-vH)-CD3d-ECDTMCP- | 2857 | 2949 |
| opt2-P2A-DR5-Fc | | |
| CD8SP-FMC63-(vL-vH)-CD3g-ECDTMCP- | 2858 | 2950 |
| opt2-P2A-DR5-Fc | | |
| CD8SP-FMC63-(vL-vH)-CD3z-ECDTMCP- | 2859 | 2951 |
| opt2-P2A-DR5-Fc | | |
| CD8SP-FMC63-vL-[IgCL-TCRb-IAH-6MD]-F- | 2860 | 2952 |
| P2A-SP-FMC63-vH-[IgG1-CH1-TCRa-SDVP- | | |
| 6MD]-F-F2A-DR5-Fc | | |
| CD8SP-FMC63-vL-[IgCL-TCRg-6MD]-F-P2A- | 2861 | 2953 |
| SP-FMC63-vH-[IgG1-CH1-TCRd-6MD]-F- | | |
| F2A-DR5-Fc | | |
| CD8SP-NY-ESO-[hTCRb-KACIAH]-F-P2A-SP- | 2862 | 2954 |
| NYESO-[hTCRa-CSDVP]-F-F2A-DR5-Fc | | |
| CD8SP-NY-ESO-TCRa-F-P2A-SP-NYESO- | 2863 | 2955 |
| [hTCRb]-F-F2A-DR5-Fc | | |
| 2864 | 2956 | |
| CD8SP-FMC63-(vL-vH)-Myc-BBz-T2A-DR5- | 2865 | 2957 |
| SP-ECD-TM-CD27-CP | | |
| CD8SP-FMC63-vL-V5-[hTCRb-KACIAH]-F- | 2866 | 2958 |
| P2A-SP-FMC63-vH-Myc-[hTCRa-CSDVP]-F- | | |
| F2A-DR5-SP-ECD-TM-CD27-CP | | |
| CD8SP-FMC63-(vL-vH)-Myc-z-P2A-DR5-SP- | 2867 | 2959 |
| ECD-TM-CD27-CP | | |
| CD8SP-FMC63-(vL-vH)-CD3e-ECDTMCP- | 2868 | 2960 |
| opt2-P2A-DR5-SP-ECD-TM-CD27-CP | | |
| CD8SP-FMC63-(vL-vH)-CD3d-ECDTMCP- | 2869 | 2961 |
| opt2-P2A-DR5-SP-ECD-TM-CD27-CP | | |
| CD8SP-FMC63-(vL-vH)-CD3g-ECDTMCP- | 2870 | 2962 |
| opt2-P2A-DR5-SP-ECD-TM-CD27-CP | | |
| CD8SP-FMC63-(vL-vH)-CD3z-ECDTMCP- | 2871 | 2963 |
| opt2-P2A-DR5-SP-ECD-TM-CD27-CP | | |
| CD8SP-FMC63-vL-[IgCL-TCRb-IAH-6MD]-F- | 2872 | 2964 |
| P2A-SP-FMC63-vH-[IgG1-CH1-TCRa-SDVP- | | |
| 6MD]-F-F2A-DR5-SP-ECD-TM-CD27-CP | | |
| CD8SP-FMC63-vL-[IgCL-TCRg-6MD]-F-P2A- | 2873 | 2965 |
| SP-FMC63-vH-[IgG1-CH1-TCRd-6MD]-F- | | |
| F2A-DR5-SP-ECD-TM-CD27-CP | | |
| CD8SP-NY-ESO-[hTCRb-KACIAH]-F-P2A-SP- | 2874 | 2966 |
| NYESO-[hTCRa-CSDVP]-F-F2A-DR5-SP-ECD- | | |
| TM-CD27-CP | | |
| CD8SP-NY-ESO-TCRa-F-P2A-SP-NYESO- | 2875 | 2967 |
| [hTCRb]-F-F2A-DR5-SP-ECD-TM-CD27-CP | 2876 | 2968 |
| CD8SP-FMC63-(vL-vH)-Myc-BBz-T2A-DR5- | 2877 | 2969 |
| SP-ECD-TM-CD2 8-CP | | |
| CD8SP-FMC63-vL-V5-[hTCRb-KACIAH]-F- | 2878 | 2970 |
| P2A-SP-FMC63-vH-Myc-[hTCRa-CSDVP]-F- | | |
| F2A-DR5-SP-ECD-TM-CD28-CP | | |
| CD8SP-FMC63-(vL-vH)-Myc-z-P2A-DR5-SP- | 2879 | 2971 |
| ECD-TM-CD28-CP | | |
| CD8SP-FMC63-(vL-vH)-CD3e-ECDTMCP- | 2880 | 2972 |
| opt2-P2A-DR5-SP-ECD-TM-CD28-CP | | |
| CD8SP-FMC63-(vL-vH)-CD3d-ECDTMCP- | 2881 | 2973 |
| opt2-P2A-DR5-SP-ECD-TM-CD28-CP | | |
| CD8SP-FMC63-(vL-vH)-CD3g-ECDTMCP- | 2882 | 2974 |
| opt2-P2A-DR5-SP-ECD-TM-CD28-CP | | |
| CD8SP-FMC63-(vL-vH)-CD3z-ECDTMCP- | 2883 | 2975 |
| opt2-P2A-DR5-SP-ECD-TM-CD28-CP | | |
| CD8SP-FMC63-vL-[IgCL-TCRb-IAH-6MD]-F- | 2884 | 2976 |
| P2A-SP-FMC63-vH-[IgG1-CH1-TCRa-SDVP- | | |
| 6MD]-F-F2A-DR5-SP-ECD-TM-CD28-CP | | |
| CD8SP-FMC63-vL-[IgCL-TCRg-6MD]-F-P2A- | 2885 | 2977 |
| SP-FMC63-vH-[IgG1-CH1-TCRd-6MD]-F- | | |
| F2A-DR5-SP-ECD-TM-CD28-CP | | |
| CD8SP-NY-ESO-[hTCRb-KACIAH]-F-P2A-SP- | 2886 | 2978 |
| NYESO-[hTCRa-CSDVP]-F-F2A-DR5-SP-ECD- | | |
| TM-CD28-CP | | |
| CD8SP-NY-ESO-TCRa-F-P2A-SP-NYESO- | 2887 | 2979 |
| [hTCRb]-F-F2A-DR5-SP-ECD-TM-CD28-CP | 2888 | 2980 |
| CD8SP-FMC63-(vL-vH)-Myc-BBz-T2A-DR5- | 2889 | 2981 |
| SP-ECD-TM-41BB-CP | | |
| CD8SP-FMC63-vL-V5-[hTCRb-KACIAH]-F- | 2890 | 2982 |
| P2A-SP-FMC63-vH-Myc-[hTCRa-CSDVP]-F- | | |
| F2A-DR5-SP-ECD-TM-41BB-CP | | |
| CD8SP-FMC63-(vL-vH)-Myc-z-P2A-DR5-SP- | 2891 | 2983 |
| ECD-TM-41BB-CP | | |
| CD8SP-FMC63-(vL-vH)-CD3e-ECDTMCP- | 2892 | 2984 |
| opt2-P2A-DR5-SP-ECD-TM-41BB-CP | | |
| CD8SP-FMC63-(vL-vH)-CD3d-ECDTMCP- | 2893 | 2985 |
| opt2-P2A-DR5-SP-ECD-TM-41BB-CP | | |
| CD8SP-FMC63-(vL-vH)-CD3g-ECDTMCP- | 2894 | 2986 |
| opt2-P2A-DR5-SP-ECD-TM-41BB-CP | | |
| CD8SP-FMC63-(vL-vH)-CD3z-ECDTMCP- | 2895 | 2987 |
| opt2-P2A-DR5-SP-ECD-TM-41BB-CP | | |
| CD8SP-FMC63-vL-[IgCL-TCRb-IAH-6MD]-F- | 2896 | 2988 |
| P2A-SP-FMC63-vH-[IgG1-CH1-TCRa-SDVP- | | |
| 6MD]-F-F2A-DR5-SP-ECD-TM-41BB-CP | | |
| CD8SP-FMC63-vL-[IgCL-TCRg-6MD]-F-P2A- | 2897 | 2989 |
| SP-FMC63-vH-[IgG1-CH1-TCRd-6MD]-F- | | |
| F2A-DR5-SP-ECD-TM-41BB-CP | | |
| CD8SP-NY-ESO-[hTCRb-KACIAH]-F-P2A-SP- | 2898 | 2990 |
| NYESO-[hTCRa-CSDVP]-F-F2A-DR5-SP-ECD- | | |
| TM-41BB-CP | | |
| CD8SP-NY-ESO-TCRa-F-P2A-SP-NYESO- | 2899 | 2991 |
| [hTCRb]-F-F2A-DR5-SP-ECD-TM-41BB-CP | 2900 | 2992 |
| CD8SP-FMC63-(vL-vH)-Myc-BBz-T2A-DR5- | 2901 | 2993 |
| SP-ECD-TM-OX40-CP | | |
| CD8SP-FMC63-vL-V5-[hTCRb-KACIAH]-F- | 2902 | 2994 |
| P2A-SP-FMC63-vH-Myc-[hTCRa-CSDVP]-F- | | |
| F2A-DR5-SP-ECD-TM-OX40-CP | | |
| CD8SP-FMC63-(vL-vH)-Myc-z-P2A-DR5-SP- | 2903 | 2995 |
| ECD-TM-OX40-CP | | |
| CD8SP-FMC63-(vL-vH)-CD3e-ECDTMCP- | 2904 | 2996 |
| opt2-P2A-DR5-SP-ECD-TM-OX40-CP | | |
| CD8SP-FMC63-(vL-vH)-CD3d-ECDTMCP- | 2905 | 2997 |
| opt2-P2A-DR5-SP-ECD-TM-OX40-CP | | |
| CD8SP-FMC63-(vL-vH)-CD3g-ECDTMCP- | 2906 | 2998 |
| opt2-P2A-DR5-SP-ECD-TM-OX40-CP | | |
| CD8SP-FMC63-(vL-vH)-CD3z-ECDTMCP- | 2907 | 2999 |
| opt2-P2A-DR5-SP-ECD-TM-OX40-CP | | |
| CD8SP-FMC63-vL-[IgCL-TCRb-IAH-6MD]-F- | 2908 | 3000 |
| P2A-SP-FMC63-vH-[IgG1-CH1-TCRa-SDVP- | | |
| 6MD]-F-F2A-DR5-SP-ECD-TM-OX40-CP | | |
| CD8SP-FMC63-vL-[IgCL-TCRg-6MD]-F-P2A- | 2909 | 3001 |
| SP-FMC63-vH-[IgG1-CH1-TCRd-6MD]-F- | | |
| F2A-DR5-SP-ECD-TM-OX40-CP | | |
| CD8SP-NY-ESO-[hTCRb-KACIAH]-F-P2A-SP- | 2910 | 3002 |
| NYESO-[hTCRa-CSDVP]-F-F2A-DR5-SP-ECD- | | |
| TM-OX40-CP | | |
| CD8SP-NY-ESO-TCRa-F-P2A-SP-NYESO- | 2911 | 3003 |
| [hTCRb]-F-F2A-DR5-SP-ECD-TM-OX40-CP | 2912 | 3004 |
| CD8SP-FMC63-(vL-vH)-Myc-BBz-T2A-DR5- | 2913 | 3005 |
| SP-ECD-TM-GITR-CP | | |
| CD8SP-FMC63-vL-V5-[hTCRb-KACIAH]-F- | 2914 | 3006 |
| P2A-SP-FMC63-vH-Myc-[hTCRa-CSDVP]-F- | | |
| F2A-DR5-SP-ECD-TM-GITR-CP | | |
| CD8SP-FMC63-(vL-vH)-Myc-z-P2A-DR5-SP- | 2915 | 3007 |
| ECD-TM-GITR-CP | | |
| CD8SP-FMC63-(vL-vH)-CD3e-ECDTMCP- | 2916 | 3008 |
| opt2-P2A-DR5-SP-ECD-TM-GITR-CP | | |
| CD8SP-FMC63-(vL-vH)-CD3d-ECDTMCP- | 2917 | 3009 |
| opt2-P2A-DR5-SP-ECD-TM-GITR-CP | | |
| CD8SP-FMC63-(vL-vH)-CD3g-ECDTMCP- | 2918 | 3010 |
| opt2-P2A-DR5-SP-ECD-TM-GITR-CP | | |
| CD8SP-FMC63-(vL-vH)-CD3z-ECDTMCP- | 2919 | 3011 |
| opt2-P2A-DR5-SP-ECD-TM-GITR-CP | | |
| CD8SP-FMC63-vL-[IgCL-TCRb-IAH-6MD]-F- | 2920 | 3012 |
| P2A-SP-FMC63-vH-[IgG1-CH1-TCRa-SDVP- | | |
| 6MD]-F-F2A-DR5-SP-ECD-TM-GITR-CP | | |
| CD8SP-FMC63-vL-[IgCL-TCRg-6MD]-F-P2A- | 2921 | 3013 |
| SP-FMC63-vH-[IgG1-CH1-TCRd-6MD]-F- | | |
| F2A-DR5-SP-ECD-TM-GITR-CP | | |
| CD8SP-NY-ESO-[hTCRb-KACIAH]-F-P2A-SP- | 2922 | 3014 |
| NYESO-[hTCRa-CSDVP]-F-F2A-DR5-SP-ECD- | | |
| TM-GITR-CP | | |
| CD8SP-NY-ESO-TCRa-F-P2A-SP-NYESO- | 2923 | 3015 |
| [hTCRb]-F-F2A-DR5-SP-ECD-TM-GITR-CP | 2924 | 3016 |
| CD8SP-FMC63-(vL-vH)-Myc-BBz-T2A-DR5- | 2925 | 3017 |
| SP-ECD-TM-BCMA-CP | | |
| CD8SP-FMC63-vL-V5-[hTCRb-KACIAH]-F- | 2926 | 3018 |
| P2A-SP-FMC63-vH-Myc-[hTCRa-CSDVP]-F- | | |
| F2A-DR5-SP-ECD-TM-BCMA-CP | | |
| CD8SP-FMC63-(vL-vH)-Myc-z-P2A-DR5-SP- | 2927 | 3019 |
| ECD-TM-BCMA-CP | | |
| CD8SP-FMC63-(vL-vH)-CD3e-ECDTMCP- | 2928 | 3020 |
| opt2-P2A-DR5-SP-ECD-TM-BCMA-CP | | |
| CD8SP-FMC63-(vL-vH)-CD3d-ECDTMCP- | 2929 | 3021 |
| opt2-P2A-DR5-SP-ECD-TM-BCMA-CP | | |
| CD8SP-FMC63-(vL-vH)-CD3g-ECDTMCP- | 2930 | 3022 |
| opt2-P2A-DR5-SP-ECD-TM-BCMA-CP | | |
| CD8SP-FMC63-(vL-vH)-CD3z-ECDTMCP- | 2931 | 3023 |
| opt2-P2A-DR5-SP-ECD-TM-BCMA-CP | | |
| CD8SP-FMC63-vL-[IgCL-TCRb-IAH-6MD]-F- | 2932 | 3024 |
| P2A-SP-FMC63-vH-[IgG1-CH1-TCRa-SDVP- | | |
| 6MD]-F-F2A-DR5-SP-ECD-TM-BCMA-CP | | |
| CD8SP-FMC63-vL-[IgCL-TCRg-6MD]-F-P2A- | 2933 | 3025 |
| SP-FMC63-vH-[IgG1-CH1-TCRd-6MD]-F- | | |
| F2A-DR5-SP-ECD-TM-BCMA-CP | | |
| CD8SP-NY-ESO-[hTCRb-KACIAH]-F-P2A-SP- | 2934 | 3026 |
| NYESO-[hTCRa-CSDVP]-F-F2A-DR5-SP-ECD- | | |
| TM-BCMA-CP | | |
| CD8SP-NY-ESO-TCRa-F-P2A-SP-NYESO- | 2935 | 3027 |
| [hTCRb]-F-F2A-DR5-SP-ECD-TM-BCMA-CP | | |

TABLE 7B
Nucleic acid vectors and components

| SEQ ID | NAME |
|---|---|
| 337 | pLenti-EF1a |
| 338 | pLenti-EF1a-DWPRE |
| 339 | EFlalpha_(EF1a)_Promoter_Variant |
| 340 | SV40-polyA |
| 341 | PolyA |
| 342 | PolyA |
| 343 | PolyA |
| 344 | DNA barcode 1 |
| 345 | DNA barcode 2 |
| 346 | DNA barcode 3 |
| 347 | DNA barcode 4 |
| 348 | DNA barcode 5 |
| 349 | DNA barcode 6 |
| 350 | Plenti-EF1a-FMC63(yL-yH)-GGSG- |
| | NLuc-AcV5-U09 |
| 351 | MSCVhygro-GLuc-HA-G02 |
| 352 | pLENTI-NLuc-AcV5-Blasticidin-Pa08 |
| 353 | H1-promoter |
| 354 | H1-shRNA-BRD9 |
| 355 | pLenti-EF1a-shRNA-BRD9-DWPRE |
| 356 | pLenti-EF1a-CD8SP-FMC63-a-V5- |
| | [hTCRb-KACIAH]-F-P2A-SP- |
| | FMC63-yH-Myc-[hTCRa-CSDVP]- |
| | F-F2A-PAC-shRNA-BRD9-DWPRE |
| 357 | pLKO.1 |
| 358 | pX601-AAV-CMV-NLS-SaCas9-NLS- |
| | 3xHA-bGHpA-U6-BsaI-sgRNA |
| 359 | pLenti-CRISPR-y2 |

TABLE 7C
Exemplary CAR/TCR constructs

| | | SEQ |
|---|---|---|
| TARGET | | ID |
| ANTIGEN | NAME OF CAR/TCR CONSTRUCT | NO |
| CD19 | CD8SP-FMC63-(vL-vH)-Myc-BBz | 2822 |
| BCMA | CD8SP-BCMA-J6M0-(vL-vH)-Myc-BBz | 2823 |
| CD20 | CD8SP-CD20-2F2-(vL-vH)-Myc-BBz | 2824 |
| CD123 | CD8SP-CD123-1172-(vL-vH)-Myc-BBz | 2825 |
| CS1 | CD8SP-CS1-HuLuc64-(vL-vH)-Myc- | 2826 |
| | BBz | |
| Folate | CD8SP-FR1-huMov19-(vL-vH)-Myc- | 2827 |
| Receptor 1 | BBz | |
| GM1 | CD8SP-GM1-5B2-(vL-vH)-Myc-BBz | 2828 |
| IL13Ra2 | CD8SP-IL13Ra2-hu107-(vL-vH)-Myc- | 2829 |
| | BBz | |
| IL13Ra2 | CD8SP-IL13Ra2-Hu108-(vL-vH)-Myc- | 2830 |
| | BBz | |
| Her2 | CD8SP-Her2-Hu4D5-(vL-vH)-Myc-BBz | 2831 |
| Mesothelin | CD8SP-Mesothelin-m912-(vH-vL)- | 2832 |
| | Myc-BBz | |
| MPL | CD8SP-MPL-161-(vL-vH)-Myc-BBz | 2833 |
| WT1/MHC I | CD8SP-WT1-Ab1-(vL-vH)-Myc-BBz | 2834 |
| AFP/MHC | CD8SP-AFP-76-(vL-vH)-Myc-BBz | 2835 |
| complex | | |
| NY-ESO/MHC | NY-ESO-[TCRa]-F-P2A-NYESO- | 2836 |
| complex | [hTCRb] | |

TABLE 7D
SEQ ID NO of Extracellular Domain of Proteins that
can be expressed on APC (Antigen Presenting Cells)
or conjugated to Antigen Presenting Substrates (APS)

| | Extracellular Domain of Receptors that |
|---|---|
| SEQ | can be expressed on APC or conjugated |
| ID NO | to Antigen Presenting Substrates |
| 3038 | CD19-ECD |
| 3039 | MPL-ECD |
| 3040 | PD1-ECD |
| 3041 | CTLA4-ECD |
| 3042 | CD138-SDC1-ECD |
| 3043 | CD123-ECD |
| 3044 | CDH1-ECD |
| 3045 | CD200R1L-ECD |
| 3046 | GPNMB-ECD |
| 3047 | PTK7-ECD |
| 3048 | CD33-ECD |
| 3049 | CD34-ECD |
| 3050 | EpCAM-ECD |
| 3051 | CLEC12A-ECD |
| 3052 | CD20-ECx2-ECD |
| 3053 | CD20-ECX1-ECD |
| 3054 | CD22-v5-ECD |
| 3055 | Thyroid Stimulating Hormone Receptor |
| | (TSHR)-ECD |
| 3056 | EGFRviii-ECD |
| 3057 | BCMA-ECD |
| 3058 | SLAMF7-CS1-ECD |
| 3059 | NKG2D-ECD |

[0385] The disclosure provides cell therapy products (e.g., immune effector cells e.g., T cells, NK cells, CAR-T cells, TCR-T cells) that are engineered to contain one or more CARs (or TCRs) that target disease causing or disease associated cells, such as cancer cells. This is achieved through an antigen binding domain on the CAR or TCR that is specific for a cancer associated antigen. There are two classes of cancer associated antigens (tumor antigens) that can be targeted by the CARs and/or TCRs: (1) cancer associated antigens that are expressed on the surface of cancer cells; and (2) cancer associated antigens that itself is intracelluar, however, a fragment of such antigen (peptide) is presented on the surface of the cancer cells by MHC (major histocompatibility complex).

[0386] Accordingly, the cells therapy products (e.g., immune cells) expressing the CARs of the disclosure may target one or more of the following cancer associated antigens (tumor antigens): CD5, CD19; CD123; CD22; CD30; CD171; CS-1 (also referred to as CD2 subset 1, CRACC, SLAMF7, CD319, and 19A24); C-type lectin-like molecule-1 (CLL-1 or CLECL1); CD33; epidermal growth factor receptor variant III (EGFRviii); ganglioside G2 (GD2); ganglioside GD3 (aNeu5Ac(2-8)aNeu5Ac(2-3)bDGalp(1-4)bDGlcp(1-1)Cer); TNF receptor family member B cell maturation (BCMA); Tn antigen ((Tn Ag) or (GalNAcα-Ser/Thr)); prostate-specific membrane antigen (PSMA); Receptor tyrosine kinase-like orphan receptor 1 (ROR1); FmsLike Tyrosine Kinase 3 (FLT3); Tumor-associated glycoprotein 72 (TAG72); CD38; CD44v6; a glycosylated CD43 epitope expressed on acute leukemia or lymphoma but not on hematopoietic progenitors, a glycosylated CD43 epitope expressed on non-hematopoietic cancers, Carcinoembryonic antigen (CEA); Epithelial cell adhesion molecule (EPCAM); B7H3 (CD276); KIT (CD117); Interleukin-13 receptor subunit alpha-2 (IL-13Ra2 or CD213A2); Mesothelin; Interleukin 11 receptor alpha (IL-11Ra); prostate stem cell antigen (PSCA); Protease Serine 21 (Testisin or PRSS21); vascular endothelial growth factor receptor 2 (VEGFR2); Lewis(Y) antigen; CD24; Platelet-derived growth factor receptor beta (PDGFR-beta); Stage-specific embryonic antigen-4 (SSEA-4); CD20/MS4A1; Folate receptor alpha; Receptor tyrosine-protein kinase ERBB2 (Her2/neu); Mucin 1, cell surface associated (MUC1); epidermal growth factor receptor (EGFR); neural cell adhesion molecule (NCAM); Prostase; prostatic acid phosphatase (PAP); elongation factor 2 mutated (ELF2M); Ephrin B2; fibroblast activation protein alpha (FAP); insulin-like growth factor 1 receptor (IGF-I receptor), carbonic anhydrase IX (CA1X); Proteasome (Prosome, Macropain) Subunit, Beta Type, 9 (LMP2); glycoprotein 100 (gp100); oncogene fusion protein consisting of breakpoint cluster region (BCR) and Abelson murine leukemia viral oncogene homolog 1 (Abl) (bcr-abl); tyrosinase; ephrin type-A receptor 2 (EphA2); Fucosyl GM1; sialyl Lewis adhesion molecule (sLe); ganglioside GM3 (aNeu5Ac(2-3)bDClalp(1-4)bDGlcp(1-1)Cer); transglutaminase 5 (TGS5); high molecular weight-melanomaassociated antigen (HMWMAA); o-acetyl-GD2 ganglioside (OAcGD2); tumor endothelial marker 1 (TEM1/CD248); tumor endothelial marker 7-related (TEM7R); claudin 6 (CLDN6); thyroid stimulating hormone receptor (TSHR); G protein coupled receptor class C group 5, member D (GPRCSD); chromosome X open reading frame 61 (CXORF61); CD97; CD179a; anaplastic lymphoma kinase (ALK); Polysialic acid; placenta-specific 1 (PLAC1); hexasaccharide portion of globoH glycoceramide (GloboH); mammary gland differentiation antigen (NY-BR-1); uroplakin 2 (UPK2); Hepatitis A virus cellular receptor 1 (HAVCR1); adrenoceptor beta 3 (ADRB3); pannexin 3 (PANX3); G protein-coupled receptor 20 (GPR20); lymphocyte antigen 6 complex, locus K 9 (LY6K); Olfactory receptor 51E2 (OR51E2); TCR Gamma Alternate Reading Frame Protein (TARP); Wilms tumor protein (WT1); Cancer/testis antigen 1 (NY-ESO-1); Cancer/testis antigen 2 (LAGE-1a); Melanoma-associated antigen 1 (MAGE-A1); ETS translocation-variant gene 6, located on chromosome 12p (ETV6-AML); sperm protein 17 (SPA17); X Antigen Family, Member 1A (XAGE1); angiopoietin-binding cell surface receptor 2 (Tie 2); melanoma cancer testis antigen-1 (MAD-CT-1); melanoma cancer testis antigen-2 (MAD-CT-2); Fos-related antigen 1; tumor protein p53 (p53); p53 mutant; prostein; surviving; telomerase; prostate carcinoma tumor antigen-1 (PCT A-1 or Galectin 8), melanoma antigen recognized by T cells 1 (MelanA or MARTI); Rat sarcoma (Ras) mutant; human Telomerase reverse transcriptase (hTERT); sarcoma translocation breakpoints; melanoma inhibitor of apoptosis (ML-IAP); ERG (transmembrane protease, serine 2 (TMPRSS2) ETS fusion gene); N-Acetyl glucosaminyl-transferase V (NA17); paired box protein Pax-3 (PAX3); Androgen receptor; Cyclin B1; v-myc avian myelocytomatosis viral oncogene neuroblastoma derived homolog (MYCN); Ras Homolog Family Member C (RhoC); Tyrosinase-related protein 2 (TRP-2); Cytochrome P450 1B 1 (CYP1B 1); CCCTC-Binding Factor (Zinc Finger Protein)-Like (BORIS or Brother of the Regulator oflmprinted Sites), Squamous Cell Carcinoma Antigen Recognized By T Cells 3 (SART3); Paired box protein Pax-5 (PAX5); proacrosin binding protein sp32 (OY-TES1); lymphocyte-specific protein tyrosine kinase (LCK); A kinase anchor protein 4 (AKAP-4); synovial sarcoma, X breakpoint 2 (SSX2); Receptor for Advanced Glycation End products (RAGE-1); renal ubiquitous 1 (RU1); renal ubiquitous 2 (RU2); legumain; human papilloma virus E6 (HPV E6); human papilloma virus E7 (HPV E7); intestinal carboxyl esterase; heat shock protein 70-2 mutated (mut hsp70-2); CD79a; CD79b; CD72; Leukocyte-associated immunoglobulin-like receptor 1 (LAIRI); Fc fragment of IgA receptor (FCAR or CD89); Leukocyte immunoglobulin-like receptor subfamily A member 2 (LILRA2); CD300 molecule-like family member f (CD300LF); C-type lectin domain family 12 member A (CLEC12A); bone marrow stromal cell antigen 2 (BST2); EGF-like module-containing mucin-like hormone receptor-like 2 (EMR2); lymphocyte antigen 75 (LY75); Glypican-3 (GPC3); Fc receptor-like 5 (FCRL5); and immunoglobulin lambda-like polypeptide 1 (IGLL1), MPL, Biotin, c-MYC epitope Tag, CD34, LAMP1 TROP2, GFRalpha4, CDH17, CDH6, NYBRI, CDH19, CD200R, Slea (CA19.9; Sialyl Lewis Antigen) Fucosyl-GM1, PTK7, gpNMB, CDH1-CD324, DLL3, CD276/B7H3, IL11Ra, IL13Ra2, CD179b-IGL11, ALK TCRgamma-delta, NKG2D, CD32 (FCGR2A), CSPG4-HMW-MAA, Tim1-/HVCR1, CSF2RA (GM-CSFR-alpha), TGFbetaR2, VEGFR2/KDR, Lews Ag, TCR-beta1 chain, TCR-beta2 chain, TCR-gamma chain, TCR-delta chain, FITC, Leutenizing hormone receptor (LHR), Follicle stimulating hormone receptor (FSHR), Chorionic Gonadotropin Hormone receptor (CGHR), CCR4, SLAMF6, SLAMF4, HIV1 envelope glycoprotein, HTLV1-Tax, CMV pp65, EBV-EBNA3c, influenza A hemagglutinin (HA), GAD, PDL1, Guanylyl cyclase C (GCC), KSHV-K8.1 protein, KSHV-gH protein, auto-antibody to desmoglein 3 (Dsg3), autoantibody to desmoglein 1 (Dsg1), HLA, HLA-A, HLA-A2, HLA-B, HLA-C, HLA-DP, HLA-DM, HLA-DOA, HLA-DOB, HLA-DQ, HLA-DR, HLA-G, IGE, CD99, RAS G12V, Tissue Factor 1 (TF1), AFP, GPRC5D, claudin18.2 (CLD18A2 OR CLDN18A.2)), P-glycoprotein, STEAPI, LIV1, NECTIN-4, CRIPTO, MPL, GPA33, BST1/CD157, low conductance chloride channel, Integrin B7, Muc17, C16ORF54, VISTA, Muc5Ac, FCRH5, CLDN6, MMP16, UPK1B, BMPR1B, Ly6E, WISP1 and SLC34A2.

[0387] The SEQ ID Nos of several exemplary CARs/TCRs are listed in Table 7C.

[0388] A CAR can comprise an antigen binding domain (e.g., antibody or antibody fragment, TCR or TCR fragment) that binds to a tumor-supporting antigen (e.g., a tumor-supporting antigen as described herein). In some embodiments, the tumor-supporting antigen is an antigen present on a stromal cell or a myeloid-derived suppressor cell (MDSC).

[0389] The disclosure encompasses a recombinant DNA construct comprising sequences encoding a natural (e.g., a TCR) or a Synthetic Immune Receptor (e.g., a 2nd generation CAR or a SIR).

[0390] In specific aspects, a CAR may comprise a scFv domain, wherein the scFv may be preceded by an optional leader sequence such as provided in SEQ ID NO (PRT):1834 and 1835, and followed by an optional hinge sequence and transmembrane region such as provided in SEQ ID NO: 1854, an intracellular signalling domain that includes SEQ ID NO: 1857 and a CD3 zeta sequence that includes SEQ ID NO: 1857 or SEQ ID NO:1858, e.g., wherein the domains are contiguous with and in the same reading frame to form a single fusion protein.

[0391] An exemplary leader sequence is provided as SEQ ID NO:1834.

[0392] An exemplary hinge and transmembrane domain sequence is provided as SEQ ID NO: 1854. An exemplary sequence of the intracellular signaling domain of the 4-1BB protein is provided as SEQ ID NO: 1857. An exemplary CD3zeta domain sequence is provided as SEQ ID NO: 1858 or SEQ ID NO:1859.

[0393] Exemplary second generation CARs targeting CD19 are presented in SEQ ID NO: 1903 and 1904. These CAR constructs also encode for a puromycin resistance gene (PAC) that is separted from the CAR polypeptide by a T2A cleavage sequence. The names and SEQ IDs of exemplary second generation CARs targeting CD19 and co-expressing constitutive active mutants of JAK3 (SEQ ID NO: 1911 and 1912), STAT5b (SEQ ID NO: 1913), JAK1(SEQ ID NO: 1914), CARD11 (SEQ ID NO: 1915), STAT3 (SEQ ID NO: 1916), and BRAF (SEQ ID NO: 1917) are shown in Table 7a.

[0394] The disclosure also covers immune effector cells expressing next generation CAR constructs, including K13 (vFLIP)-CAR, SIR (Synthetic Immune Receptor), Ab-TCR and TFP. Exemplary K13 coexpressing CAR constructs are represented by SEQ ID NO: 1908 and 1909. These CAR constructs also co-express a puromycin resistence gene (PAC), which is optional and can be deleted. Exemplary SIR constructs coexpressing an optional PAC gene are represented by SEQ ID NO:1906 and 1907.

[0395] The names and SEQ IDs of exemplary SIR (SEQ ID NO: 1918), K13-CAR (SEQ ID NO: 1919), Ab-TCR (SEQ ID NO: 1924-1925) and TFP (SEQ ID NO: 1920-1922) targeting CD19 and co-expressing constitutive active mutants of JAK3-M511I mutant are shown in Table 7a. Constructs co-expressing other constitutive active mutants can be constructed by replacing the cDNA encoding JAK3-M511I with the cDNAs corresponding to the other constitutive active mutants. The disclosure includes retroviral and lentiviral vector constructs (SEQ ID NO: 337 and 338) that can be used the various embodiments of the disclosure.

[0396] The disclosure also includes an RNA construct that can be directly transfected into a cell. A method for generating mRNA for use in transfection involves in vitro transcription (IVT) of a template with specially designed primers, followed by polyA addition, to produce a construct containing 3′ and 5′ untranslated sequence (“UTR”) (e.g., a 3′ and/or 5′ UTR described herein), a 5′ cap (e.g., a 5′ cap described herein) and/or Internal Ribosome Entry Site (IRES) (e.g., an IRES described herein), the nucleic acid to be expressed, and a polyA tail, typically 50-2000 bases in length (SEQ ID NO:341). RNA so produced can efficiently transfect different kinds of cells. In one embodiment, the template includes sequences for the CAR. In an embodiment, an RNA CAR vector is transduced into a cell, e.g., a T cell or a NKcell, by electroporation.

[0397] The CAR/TCR comprise a target-specific binding element otherwise referred to as an antigen binding domain. Conventional and next generation CARs (e.g., SIR, Ab-TCR, TFP etc) against a number of antigens are described in the art, including in patent applications PCT/US2017/024843 and PCT/US17/64379, which are incorporated herein in their entirety by reference. The CARs described in these applications can be used in combination with the methods of the disclosure to target different antigens for the prevention and treatment of various disease conditions in which the disease associated or disease-causing cells express the specific antigen targeted by the CAR. Similarly, TCR targeting different antigens and neo-antigens are known in the art and can be used in combination with the methods of the disclosure. Finally, the efficacy and safety of tumor infliterating lymphocytes and T cells generated following vaccination with neo-antigen peptides can be improved by use of the methods of the disclosure.

[0398] In one embodiment, the antigen binding domain comprises one, two three (e.g., all three) heavy chain CDRs, HC CDR1, HC CDR2 and HC CDR3, from an antibody listed above, and/or one, two, three (e.g., all three) light chain CDRs, LC CDRI, LC CDR2 and LC CDR3, from an antibody or single chain variable fragment described in PCT/US2017/024843 and PCT/US17/64379. In another aspect, the antigen binding domain is a cytokine, a receptor, a centryn, a non-immunoglobulin antigen binding domain.

[0399] In another aspect, the cell therapy products (e.g., CAR-T cell) described herein can further express another agent, e.g., an agent which enhances the activity of the cell therapy products (e.g. CAR-expressing cell). For example, in one embodiment, the agent can be a constitutive active mutant of JAK3 (SEQ ID NO: 1911 and 1912), STAT5b (SEQ ID NO: 1913), JAK1(SEQ ID NO: 1914), CARD11 (SEQ ID NO: 1915), STAT3 (SEQ ID NO: 1916), and BRAF (SEQ ID NO: 1917). In another embodiment, the agent can be an inhibitor of BRD9, EZH2, MLL2, MLL3, MLL4, methylcytosine dioxygenase genes (e.g., Tet1, Tet2, Tet3), ATM, CHEK, FBXW10, BCOR, FAT1, ASXL1, PHF6, SF3B1, YY1, CBFb, Runx1, EHMT2 (G9A), SMARCA4, CREBBP, PRDM1/BLIMP1, HDAC2, TRAIL, and/or DR5.

[0400] In another aspect, the disclosure provides a population of cell therapy products, e.g., CAR-T and/or TCR-T cells. In some embodiments, the cell therapy products comprise a mixture of cells expressing different CARs.

[0401] In another aspect, the disclosure provides a population of cells wherein at least one cell in the population expresses a CAR having an antigen binding domain to a cancer associated antigen described herein, and a second cell expressing another agent, e.g., an agent which enhances the activity of a CAR-expressing cell. In one aspect, the disclosure provides methods comprising administering a population of CAR-expressing cells, e.g., CART cells, e.g., a mixture of cells expressing different CARs, in combination with another agent, e.g., a kinase inhibitor, such as a kinase inhibitor described herein. In another aspect, the disclosure provides methods comprising administering a population of cells wherein at least one cell in the population expresses a CAR having an antigen binding domain of a cancer associated antigen described herein, and a second cell expressing another agent, e.g., an agent which enhances the activity of a CAR-expressing cell, in combination with another agent, e.g., a kinase inhibitor, such as a kinase inhibitor described herein.

[0402] The nucleic acids encoding the different constructs (e.g., CARs, SIRs, TCRs, constitutive active and dominant negative mutants of JAK3, STAT5 etc.) of the disclosure can be delivered to cells using methods known in the art. A method for generating mRNA for use in transfection can involve in vitro transcription (IVT) of a template with specially designed primers, followed by polyA addition, to produce a construct containing 3′ and 5′ untranslated sequence (“UTR”), a 5′ cap and/or Internal Ribosome Entry Site (IRES), the nucleic acid to be expressed, and a polyA tail, typically 50-2000 bases in length (SEQ ID NO:32). RNA so produced can efficiently transfect different kinds of cells. In one aspect, the template includes sequences for the CAR.

[0403] In some aspects, non-viral methods can be used to deliver a nucleic acid encoding the different constructs described herein into a cell or tissue or a subject. In some embodiments, the non-viral method includes the use of a transposon (also called a transposable element). Exemplary methods of nucleic acid delivery using a transposon include a Sleeping Beauty transposon system (SETS) and a piggyBac (PB) transposon system.

[0404] Methods of constructing and delivering vectors with different configurations of CAR, including next generation CARs, are known in the art and are described in patent applications PCT/US2017/024843, WO 2014/160030 A2, WO 2016/187349 A1, PCT/US2016/058305 and PCT/US17/64379, which are incorporated herein by reference in their entirety.

[0405] The disclosure also provides vectors in which a DNA of the disclosure is inserted. Vectors derived from retroviruses such as the lentivirus are suitable tools to achieve long-term gene transfer since they allow long-term, stable integration of a transgene and its propagation in daughter cells.

[0406] During the manufacturing of cell therapy products, immune effector cells (e.g., T cells) may be activated and expanded generally using methods known in the art. Generally, a population of immune effector cells e.g., Plerixafor mobilized cells, may be expanded by contact with a surface having attached thereto an agent that stimulates a CD3/TCR complex associated signal and a ligand that stimulates a costimulatory molecule on the surface of the T cells.

[0407] In certain aspects, the primary stimulatory signal and the costimulatory signal for the T cell may be provided by different protocols. For example, the agents providing each signal may be in solution or coupled to a surface. When coupled to a surface, the agents may be coupled to the same surface (i.e., in “cis” formation) or to separate surfaces (i.e., in “trans” formation). Alternatively, one agent may be coupled to a surface and the other agent in solution.

[0408] The present disclosure provides novel antigen presenting cells for activation and expansion of immune cells during the manufacturing of cell therapy products. In one embodiment, cells transduced with a nucleic acid encoding a CAR (e.g., a CAR, e.g., a SIR) are expanded by co-culturing them with an antigen presenting cell. In one embodiment, T cells transduced with a nucleic acid encoding a CAR, e.g., a CAR described herein, are expanded by co-culturing them with cells expressing the antigen targeted by the CAR. In one embodiment, the T cells are transduced with a nucleic acid encoding a CAR and are expanded by co-culturing them with cells and/or cell lines derived from Mantle Cell Lymphoma. In one embodiment, the T cells are transduced with a nucleic acid encoding a CD19 CAR, e.g., a CD19 CAR described herein, e.g., a CAR represented by SEQ ID NO: 2822, 479, 484-498, and are expanded by co-culturing them with cells and cell lines derived from Mantle Cell Lymphoma. In one embodiment, the T cells are transduced with a nucleic acid encoding a CD20 CAR, e.g., a CD20 CAR described herein, e.g., a CAR represented by SEQ ID NO: 2824, 480 or 482, and are expanded by co-culturing them with cells and cell lines derived from Mantle Cell Lymphoma. In one embodiment, the T cells are transduced with a nucleic acid encoding a CD22 CAR, e.g., a CD22 CAR described herein, and are expanded by co-culturing them with cells and cell lines derived from Mantle Cell Lymphoma. In one embodiment, the T cells are transduced with a nucleic acid encoding a BCMA CAR, e.g., a BCMA CAR described herein, e.g., a CAR represented by SEQ ID NO: 2823, and are expanded by co-culturing them with cells and cell lines derived from Mantle Cell Lymphoma. Exemplary cell lines derived from Mantle cell lymphoma that can be used to expand and/or activate CAR-T cells targeting CD19, CD20, CD22 and BCMA incude REC-1, GRANTA-519, MINO and JEKO. In a preferred embodiment, the Mantle Cell Lymphoma cell line is REC-1.

[0409] In one embodiment, the T cells are transduced with a nucleic acid encoding a CAR and are expanded by co-culturing them with cells and cell lines that have been treated with a drug (e.g, mitomycin) or irradiation to render them replication incompetent. Methods to render cells and cell lines replication incompetent are known in the art and/or can be determined using methods known in the art.

[0410] In one embodiment, the T cells are expanded in culture for a period of several hours (e.g., about 2, 3, 4, 5, 6, 7, 8, 9, 10, 15, 18, 21 hours) to about 14 days (e.g., 1, 2, 3, 4, 5, 6, 7, 8, 9, 10, 11, 12, 13 or 14 days). In one embodiment, the cells are expanded for a period of 4 to 9 days. In one embodiment, the cells are expanded for a period of 8 days or less, e.g., 7, 6 or 5 days.

[0411] In one embodiment, the cells, e.g., a CD19 CAR-T cell described herein, are expanded in culture for 5 days, and the resulting cells are more potent than the same cells expanded in culture for 9 days under the same culture conditions. In one embodiment, the CAR-T cells, e.g., CD19 CAR-T cells described herein, are expanded in culture for 14 days with Mantle Cell Lymphoma cells, e.g, REC-1 cells, and the resulting cells are more potent than the same CAR-T cells, e.g., CD19 CAR-T cells described herein, expanded in culture under the same culture conditions but without the Mantle Cell Lymphoma cells, e.g., REC-1 cells. In one embodiment, the CAR-T cells, e.g., CD20 CAR-T cells described herein, are expanded in culture for 14 days with Mantle Cell Lymphoma cells, e.g, REC-1 cells, and the resulting cells are more potent than the same CAR-T cells, e.g., CD20 CAR-T cells described herein, expanded in culture under the same culture conditions but without the Mantle Cell Lymphoma cells, e.g., REC-1 cells. In one embodiment, the CAR-T cells, e.g., CD22 CAR-T cells described herein, are expanded in culture for 14 days with Mantle Cell Lymphoma cells, e.g, REC-1 cells, and the resulting cells are more potent than the same CAR-T cells, e.g., CD22 CAR-T cells described herein, expanded in culture under the same culture conditions but without the Mantle Cell Lymphoma cells, e.g., REC-1 cells. In one embodiment, the CAR-T cells, e.g., BCMA CAR-T cells described herein, are expanded in culture for 14 days with Mantle Cell Lymphoma cells, e.g, REC-1 cells, and the resulting cells are more potent than the same CAR-T cells, e.g., BCMA CAR-T cells described herein, expanded in culture under the same culture conditions but without the Mantle Cell Lymphoma cells, e.g., REC-1 cells.

[0412] Potency can be defined, e.g., by various T cell functions, e.g. proliferation, target cell killing, cytokine production, activation, migration, or combinations thereof. In one embodiment, the cells, e.g., a CD19 CAR-T cell described herein, expanded for 5 days show at least a one, two, three or four-fold increase in cells doublings upon antigen stimulation as compared to the same cells expanded in culture for 9 days under the same culture conditions. In one embodiment, the cells, e.g., the cells expressing a CD19 CAR described herein, are expanded in culture for 5 days, and the resulting cells exhibit higher proinflammatory cytokine production, e.g., IFN-γ and/or GM-CSF levels, as compared to the same cells expanded in culture for 9 days under the same culture conditions. In one embodiment, the cells, e.g., a CD19 CAR-T cell described herein, expanded for 5 days show at least a one, two, three, four, five, ten fold or more increase in pg/ml of proinflammatory cytokine production, e.g., IFN-γ and/or GM-CSF levels, as compared to the same cells expanded in culture for 9 days under the same culture conditions.

[0413] Several cycles of stimulation may also be desired such that culture time of T cells can be 60 days or more. Conditions appropriate for T cell culture include an appropriate media (e.g., Minimal Essential Media or RPMI Media 1640 or, X-vivo 15, (Lonza)) that may contain factors necessary for proliferation and viability, including serum (e.g., fetal bovine or human serum), interleukin-2 (IL-2), insulin, IFN-γ, IL-4, IL-7, GM-CSF, IL-10, IL-12, IL-15, TGF, and TNF-α or any other additives for the growth of cells known to the skilled artisan. Other additives for the growth of cells include, but are not limited to, surfactant, plasmanate, and reducing agents such as N-acetyl-cysteine and 2-mercaptoethanol. Media can include RPMI 1640, AIM-V, DMEM, MEM, a-MEM, F-12, X-Vivo 15, and X-Vivo 20, Optimizer, with added amino acids, sodium pyruvate, and vitamins, either serum-free or supplemented with an appropriate amount of serum (or plasma) or a defined set of hormones, and/or an amount of cytokine(s) sufficient for the growth and expansion of T cells. Antibiotics, e.g., penicillin and streptomycin, are included only in experimental cultures, not in cultures of cells that are to be infused into a subject. The target cells are maintained under conditions necessary to support growth, for example, an appropriate temperature (e.g., 37° C.) and atmosphere (e.g., air plus 5% CO₂).

[0414] In one embodiment, the cells are expanded in an appropriate media (e.g., media described herein) that includes one or more interleukin that result in at least a 200-fold (e.g., 200-fold, 250-fold, 300-fold, 350-fold) increase in cells over a 14 days expansion period, e.g., as measured by a method described herein such as flow cytometry. In one embodiment, the cells are expanded in the presence of IL-15 and/or IL-7 (e.g., IL-15 and IL-7).

[0415] In one embodiment of the disclosure, the cells (e.g., immune cells, e.g., T cells or NK cells), e.g., immune effector cells, e.g., T cells, e.g., CART-T cells, TCR-T cells or TILs, are expanded in an appropriate media (e.g., media described herein) that includes one or more inhibitors of BRD9, EZH2, MLL2, MLL3, MLL4, methylcytosine dioxygenase genes (e.g., Tet1, Tet2, Tet3), ATM, CHEK, FBXW10, BCOR, FAT1, ASXL1, PHF6, SF3B1, YY1, CBFb, Runx1, EHMT2 (G9A), SMARCA4, CREBBP, PRDM1/BLIMP1, HDAC2, TRAIL (TNFSF10) and/or Death Receptor 5 (DR5 or TNFRSF10B) that result in at least a 1.5-fold (e.g., 2-fold, 5-fold, 10-fold, 50-fold) increase in T stem cells or T stem memory cells over a 14 day expansion period, e.g., as measured by a method described herein such as flow cytometry. In one embodiment, the cells are expanded in the presence of IL-15 and/or IL-7 (e.g., IL-15 and IL-7). In one embodiment, the cells are expanded in the presence of an inhibitor of TRAIL and/or DR5. In an embodiment, the TRAIL inhibitor is a TRAIL antibody that blocks or neutralizes the action binding or activity of TRAIL on its receptors DR5 and/or DR4. In an exemplary embodiment, the cells are expanded in the presence of a neutralizing antibody against TRAIL. An exemplary neutralizing antibody against TRAIL is represented by the TRAIL antibody MAB375-SP which is available from R&D Systems. In an embodiment, the cells are expanded in the presence of at least 1 ng/ml (e.g., 2 ng/ml, 5 ng/ml, 10 ng/ml, 20 ng/ml, 50 ng/ml) of a TRAIL antibody, e.g., MAB375-SP. In an embodiment, the cells are expanded in the presence of a TRAIL antibody, e.g., MAB375-SP for at least 1 day (e.g., 2 days, 5 days, 10 days, 15 days, 20 days). In an embodiment, the TRAIL inhibitor is a soluble form of TRAIL receptor. Exemplary soluble TRAIL receptor include DR5-Fc fusion protein (Sigma-Aldrich; D9563), DR5-SP-ECD-hIgFc (SEQ ID NO: 2428), Recombinant Human TRAIL R1/TNFRSF10A Fc Chimera Protein, CF (R&D Systems), DR4-Fc fusion protein (Sigma-Aldrich; D9438), DR4-SP-ECD-hIgFc (SEQ ID NO: 2441), Recombinant Human TRAIL R3/TNFRSF10C Fc Chimera Protein (R&D Systems); DcR1-SP-ECD-hIgFc (SEQ ID NO: 2448); Recombinant Human TRAIL R3/TNFRSF10C Fc Chimera Protein (R&D Systems) and DcR2-ECD-hIgFc (SEQ ID NO: 2455). In an embodiment, the cells are expanded in the presence of at least 1 ng/ml (e.g., 2 ng/ml, 5 ng/ml, 10 ng/ml, 20 ng/ml, 50 ng/ml, 100 ng/ml) of purified soluble TRAIL receptor, e.g., DR5-Fc fusion protein (Sigma-Aldrich; D9563) or DR4-Fc fusion protein (Sigma-Aldrich; D9438). In an embodiment, the cells are expanded in the presence of a soluble TRAIL receptor (e.g., DR5-Fc, DR4-Fc, DcR1-Fc, or DcR2-Fc) for at least 1 day (e.g., 2 days, 5 days, 10 days, 15 days, 20 days). In some embodiments, the cells are expanded in the presence of both a neutralizing TRAIL antibody (e.g., MAB375-SP) and a soluble TRAIL receptor (e.g., DR5-Fc, DR4-Fc, DcR1-Fc, or DcR2-Fc). In an embodiment, the cells are expanded in the presence of a nucleic acid inhibitor (e.g., shRNA, siRNA or gRNA) of TRAIL and/or DR5. In an embodiment, the cells are expanded in the presence of a TRAIL inhibitor and an inhibitor of one or more of BRD9, EZH2, MLL2, MLL3, MLL4, methylcytosine dioxygenase genes (e.g., Tet1, Tet2, Tet3), ATM, CHEK, FBXW10, BCOR, FAT1, ASXL1, PHF6, SF3B1, YY1, CBFb, Runx1, EHMT2 (G9A), SMARCA4, CREBBP, PRDM1/BLIMP1, HDAC2 and AKT. In an embodiment, the cells are expanded in the presence of a TRAIL inhibitor and one or more of an CD3 antibody, CD28 antibody, 41BB antibody (Utomilumab), bispecific/multispecific T cell engager, e.g, a bispecific or multispecific engager described herein, e.g., Blinatumomab. In an embodiment, the cells are expanded in the presence of a TRAIL inhibitor and a bispecific/multispecific T cell engager, e.g, a bispecific or multispecific engager described herein, in the presence of Antigen Presenting Cells (APC) or Antigen Presenting Substrate (APS), e.g., APC or APS described herein, e.g., REC-1 cells or CD19-Ectodomain (amino acid residues 61-867)-coated Beads.

[0416] The present disclosure also pertains, at least in part, to methods for improving the expansion and/or activation (e.g., in vitro and in vivo expansion and/or activation) of cells (e.g., immune cells, e.g., T cells or NK cells), e.g., immune effector cells, e.g., immune effector T cells, e.g., CAR-T cells or TCR-T cells or TILs, for the purpose of adoptive cellular therapy. Non-limiting examples of cells (e.g., immune cells, e.g., T cells or NK cells) that can be activated and/or expanded by the method of the disclosure include T cells, CD8+ T cells, CD4+ T cells, NKT cells, NK cells, monocytes and macrophages etc. In an embodiment, the cells are mobilized (e.g., Plerixafor-mobilized) cells. In an embodiment, the cells express an inhibitor of BRD9, EZH2, MLL2, MLL3, MLL4, methylcytosine dioxygenase genes (e.g., Tet1, Tet2, Tet3), ATM, CHEK, FBXW10, BCOR, FAT1, ASXL1, PHF6, SF3B1, YY1, CBFb, Runx1, EHMT2 (G9A), SMARCA4, CREBBP, PRDM1/BLIMP1, HDAC2 and AKT.

[0417] In some embodiments, the method includes contacting an immune cell e.g., an immune effector cell, e.g., an immune effector cell described herein, e.g., a T cell, e.g., a CAR-T cell or a TCR-T cell, with a bispecific or multi-specific engager with two or more antigen binding modules where at least one of the antigen binding modules binds to or engages an immune cell and where at least one of the other modules binds to or engages an antigen presenting cell (APC) or an antigen presenting substrate (APS) under conditions that result in the activation and/or expansion of the immune cells. In some embodiments, the one or all of the antigen binding modules of the bispecific or multi-specific engager comprise of or consist of (1) an antibody; (2) an antibody fragment (e.g. a Fv, a Fab, a (Fab′)2); (3) a heavy chain variable region of an antibody (vH domain) or a fragment thereof, (4) a light chain variable region of an antibody (vL domain) or a fragment thereof, (5) a single chain variable fragment (scFv) or a fragment thereof, (6) a single domain antibody (SDAB) or a fragment thereof, (7) a camelid VHH domain or a fragment thereof, (8) a monomeric variable region of an antibody; (9) a non-immunoglobulin antigen binding scaffold such as a DARPIN, an affibody, an affilin, an adnectin, an affitin, an obodies, a repebody, a fynomer, an alphabody, an avimer, an atrimer, a centyrin, a pronectin, an anticalin, a kunitz domain, an Armadillo repeat protein or a fragment thereof; (10) a receptor or a fragment thereof; (11) a ligand or a fragment thereof. In some embodiments, the two or more of the antigen binding modules of the bispecific or multispecific engager are of the same type, e.g., scFVs or vHH. In some embodiments, the two or more of the antigen binding modules of the bispecific or multispecific engager are of the different types, e.g., a scFVs and a vHH domain; a scFv and an centyrin; a vHH domain and an affibody; a scFv, a vHH domain and a centyrin.

[0418] In an embodiment a bispecific or multispecific engager is a bispecific antibody molecule, e.g., Blinatumomab. A bispecific antibody has specificity for no more than two antigens. A bispecific antibody molecule is characterized by a first immunoglobulin variable domain sequence which has binding specificity for a first epitope and a second immunoglobulin variable domain sequence that has binding specificity for a second epitope. In an embodiment the first and second epitopes are on the same antigen, e.g., the same protein (or subunit of a multimeric protein). In an embodiment the first and second epitopes overlap. In an embodiment the first and second epitopes do not overlap. In an embodiment the first and second epitopes are on different antigens, e.g., different proteins (or different subunits of a multimeric protein). In an embodiment a bispecific antibody molecule comprises a heavy chain variable domain sequence and a light chain variable domain sequence which have binding specificity for a first epitope and a heavy chain variable domain sequence and a light chain variable domain sequence which have binding specificity for a second epitope. In an embodiment a bispecific antibody molecule comprises a half antibody having binding specificity for a first epitope and a half antibody having binding specificity for a second epitope. In an embodiment a bispecific antibody molecule comprises a half antibody, or fragment thereof, having binding specificity for a first epitope and ahalf antibody, or fragment thereof, having binding specificity for a second epitope.

[0419] In an embodiment a bispecific antibody molecule comprises a scFv, or fragment thereof, have binding specificity for a first epitope and a scFv, or fragment thereof, have binding specificity for a second epitope.

[0420] In certain embodiments, the engager is an antibody molecule that is a multi-specific (e.g., a bispecific or a trispecific) molecule. Protocols for generating bispecific or heterodimeric antibody molecules are known in the art.

[0421] Within each antibody or antibody fragment (e.g., scFv) of abispecific antibody molecule, the VH can be upstream or downstream of the VL. In some embodiments, the upstream antibody or antibody fragment (e.g., scFv) is arranged with its VH (VH1) upstream of its VL (VL1) and the downstream antibody or antibody fragment (e.g., scFv) is arranged with its VL (VL2) upstream of its VH (VH2), such that the overall bispecific antibody molecule has the arrangement VH1-VL1-VL2-VH2. In other embodiments, the upstream antibody or antibody fragment (e.g., scFv) is arranged with its VL (VL1) upstream of its VH (VH1) and the downstream antibody or antibody fragment (e.g., scFv) is arranged with its VH (VH2) upstream of its VL (VL2), such that the overall bispecific antibody molecule has the arrangement VL1-VH1-VH2-VL2.

[0422] In some embodiments, the bispecific or multispecific engager targets at least one antigen (e.g., CD3, CD28, CD27, 41BB etc) expressed by an immune cell to be activated and/or expanded and at least one other antigen (e.g., CD19, Mesothelin, Her2, Her3, EGFR viii etc.) expressed by a cell other than the immune cell that is to be activated and/or expanded. In some embodiments, the other antigen is expressed or presented by an antigen presenting cell (APC) or an antigen presenting substrate (APS), e.g., CD19 ectodomain coated beads. In some embodiments, the at least one other antigen expressed by the APC or APS (e.g., CD19, CD20/MS4A1, CD22, CD23, CD123, MPL, BCMA, CS1, CD138, CD38 etc.) is expressed on hematopoietic cells, e.g., B lineage cell, a myeloid lineage cell or a plasma cell or cell lines, e.g., REC-1, NALM6, HL60, K562, BC-1, U266 etc. In some embodiments, the at least one other antigen expressed by the APC or APS (e.g., Her2, Her3, EGFR, Mesothelin, CDH19, CDH6 etc.) is expressed on non-hematopoietic cells, e.g., breast cells, lung cells, colon cells, skin cells etc, or cell lines, e.g., breast cancer cell line, e.g., MCF7, lung cancer cell line, e.g., H460, or colon cancer cell line, e.g., SW480 etc.

[0423] Non-limiting examples of the antigens expressed by the APC or APS that can be recognized by the bispecific or multispecific engager of the disclosure to activate and/or expand the immune cells include one or more of the following: CD19; CD123; CD22; CD30; CD171; CS-1 (also referred to as CD2 subset 1, CRACC, SLAMF7, CD319, and 19A24); C-type lectin-like molecule-1 (CLL-1 or CLECL1); CD33; epidermal growth factor receptor variant III (EGFRviii); ganglioside G2 (GD2); ganglioside GD3 (aNeu5Ac(2-8)aNeu5Ac(2-3)bDGalp(1-4)bDGlcp(1-1)Cer); TNF receptor family member B cell maturation (BCMA); Tn antigen ((Tn Ag) or (GalNAcα-Ser/Thr)); prostate-specific membrane antigen (PSMA); Receptor tyrosine kinase-like orphan receptor 1 (ROR1); FmsLike Tyrosine Kinase 3 (FLT3); Tumor-associated glycoprotein 72 (TAG72); CD38; CD44v6; a glycosylated CD43 epitope expressed on acute leukemia or lymphoma but not on hematopoietic progenitors, a glycosylated CD43 epitope expressed on non-hematopoietic cancers, Carcinoembryonic antigen (CEA); Epithelial cell adhesion molecule (EPCAM); B7H3 (CD276); KIT (CD117); Interleukin-13 receptor subunit alpha-2 (IL-13Ra2 or CD213A2); Mesothelin; Interleukin 11 receptor alpha (IL-11Ra); prostate stem cell antigen (PSCA); Protease Serine 21 (Testisin or PRSS21); vascular endothelial growth factor receptor 2 (VEGFR2); Lewis(Y) antigen; CD24; Platelet-derived growth factor receptor beta (PDGFR-beta); Stage-specific embryonic antigen-4 (SSEA-4); CD20/MS4A1; Folate receptor alpha; Receptor tyrosine-protein kinase ERBB2 (Her2/neu); Mucin 1, cell surface associated (MUC1); epidermal growth factor receptor (EGFR); neural cell adhesion molecule (NCAM); Prostase; prostatic acid phosphatase (PAP); elongation factor 2 mutated (ELF2M); Ephrin B2; fibroblast activation protein alpha (FAP); insulin-like growth factor 1 receptor (IGF-I receptor), carbonic anhydrase IX (CA1X); Proteasome (Prosome, Macropain) Subunit, Beta Type, 9 (LMP2); glycoprotein 100 (gp100); oncogene fusion protein consisting of breakpoint cluster region (BCR) and Abelson murine leukemia viral oncogene homolog 1 (Abl) (bcr-abl); tyrosinase; ephrin type-A receptor 2 (EphA2); Fucosyl GM1; sialyl Lewis adhesion molecule (sLe); ganglioside GM3 (aNeu5Ac(2-3)bDClalp(1-4)bDGlcp(1-1)Cer); transglutaminase 5 (TGS5); high molecular weight-melanomaassociated antigen (HMWMAA); o-acetyl-GD2 ganglioside (OAcGD2); tumor endothelial marker 1 (TEM1/CD248); tumor endothelial marker 7-related (TEM7R); claudin 6 (CLDN6); thyroid stimulating hormone receptor (TSHR); G protein coupled receptor class C group 5, member D (GPRCSD); chromosome X open reading frame 61 (CXORF61); CD97; CD179a; anaplastic lymphoma kinase (ALK); Polysialic acid; placenta-specific 1 (PLAC1); hexasaccharide portion of globoH glycoceramide (GloboH); mammary gland differentiation antigen (NY-BR-1); uroplakin 2 (UPK2); Hepatitis A virus cellular receptor 1 (HAVCR1); adrenoceptor beta 3 (ADRB3); pannexin 3 (PANX3); G protein-coupled receptor 20 (GPR20); lymphocyte antigen 6 complex, locus K 9 (LY6K); Olfactory receptor 51E2 (OR51E2); TCR Gamma Alternate Reading Frame Protein (TARP); Wilms tumor protein (WT1); Cancer/testis antigen 1 (NY-ESO-1); Cancer/testis antigen 2 (LAGE-1a); Melanoma-associated antigen 1 (MAGE-A1); ETS translocation-variant gene 6, located on chromosome 12p (ETV6-AML); sperm protein 17 (SPA17); X Antigen Family, Member 1A (XAGE1); angiopoietin-binding cell surface receptor 2 (Tie 2); melanoma cancer testis antigen-1 (MAD-CT-1); melanoma cancer testis antigen-2 (MAD-CT-2); Fos-related antigen 1; tumor protein p53 (p53); p53 mutant; prostein; surviving; telomerase; prostate carcinoma tumor antigen-1 (PCT A-1 or Galectin 8), melanoma antigen recognized by T cells 1 (MelanA or MARTI); Rat sarcoma (Ras) mutant; human Telomerase reverse transcriptase (hTERT); sarcoma translocation breakpoints; melanoma inhibitor of apoptosis (ML-IAP); ERG (transmembrane protease, serine 2 (TMPRSS2) ETS fusion gene); N-Acetyl glucosaminyl-transferase V (NA17); paired box protein Pax-3 (PAX3); Androgen receptor; Cyclin B1; v-myc avian myelocytomatosis viral oncogene neuroblastoma derived homolog (MYCN); Ras Homolog Family Member C (RhoC); Tyrosinase-related protein 2 (TRP-2); Cytochrome P450 1B 1 (CYP1B 1); CCCTC-Binding Factor (Zinc Finger Protein)-Like (BORIS or Brother of the Regulator oflmprinted Sites), Squamous Cell Carcinoma Antigen Recognized By T Cells 3 (SART3); Paired box protein Pax-5 (PAX5); proacrosin binding protein sp32 (OY-TES1); lymphocyte-specific protein tyrosine kinase (LCK); A kinase anchor protein 4 (AKAP-4); synovial sarcoma, X breakpoint 2 (SSX2); Receptor for Advanced Glycation End products (RAGE-1); renal ubiquitous 1 (RU1); renal ubiquitous 2 (RU2); legumain; human papilloma virus E6 (HPV E6); human papilloma virus E7 (HPV E7); intestinal carboxyl esterase; heat shock protein 70-2 mutated (mut hsp70-2); CD79a; CD79b; CD72; Leukocyte-associated immunoglobulin-like receptor 1 (LAIRI); Fc fragment of IgA receptor (FCAR or CD89); Leukocyte immunoglobulin-like receptor subfamily A member 2 (LILRA2); CD300 molecule-like family member f (CD300LF); C-type lectin domain family 12 member A (CLEC12A); bone marrow stromal cell antigen 2 (BST2); EGF-like module-containing mucin-like hormone receptor-like 2 (EMR2); lymphocyte antigen 75 (LY75); Glypican-3 (GPC3); Fc receptor-like 5 (FCRL5); and immunoglobulin lambda-like polypeptide 1 (IGLL1), MPL, Biotin, c-MYC epitope Tag, CD34, LAMP1 TROP2, GFRalpha4, CDH17, CDH6, NYBRI, CDH19, CD200R, Slea (CA19.9; Sialyl Lewis Antigen) Fucosyl-GM1, PTK7, gpNMB, CDH1-CD324, DLL3, CD276/B7H3, IL11Ra, IL13Ra2, CD179b-IGL11, ALK TCRgamma-delta, NKG2D, CD32 (FCGR2A), CSPG4-HMW-MAA, Tim1-/HVCR1, CSF2RA (GM-CSFR-alpha), TGFbetaR2, VEGFR2/KDR, Lews Ag, TCR-beta1 chain, TCR-beta2 chain, TCR-gamma chain, TCR-delta chain, FITC, Leutenizing hormone receptor (LHR), Follicle stimulating hormone receptor (FSHR), Chorionic Gonadotropin Hormone receptor (CGHR), CCR4, SLAMF6, SLAMF4, HIV1 envelope glycoprotein, HTLV1-Tax, CMV pp65, EBV-EBNA3c, influenza A hemagglutinin (HA), GAD, PDL1, Guanylyl cyclase C (GCC), KSHV-K8.1 protein, KSHV-gH protein, auto-antibody to desmoglein 3 (Dsg3), autoantibody to desmoglein 1 (Dsg1), HLA, HLA-A, HLA-A2, HLA-B, HLA-C, HLA-DP, HLA-DM, HLA-DOA, HLA-DOB, HLA-DQ, HLA-DR, HLA-G, IGE, CD99, RAS G12V, Tissue Factor 1 (TF1), AFP, GPRC5D, claudin18.2 (CLD18A2 OR CLDN18A.2)), P-glycoprotein, STEAPI, LIV1, NECTIN-4, CRIPTO, MPL, GPA33, BST1/CD157, low conductance chloride channel, Integrin B7, Muc17, C16ORF54, VISTA, Muc5Ac, FCRH5, CLDN6, MMP16, UPK1B, BMPR1B, Ly6E, WISP1 and SLC34A2.

[0424] Some embodiments described herein provide for expansion and/or activation of immune T cells by exposing them to a bispecific or multi-specific engager that contains one (or first) antigen binding domain capable of engaging the T cells and the other (or second) antigen binding domain capable of engaging an antigen presenting cell (APC) or antigen presenting substrate (APS). It is to be noted that the order of the antigen binding domains of a bispecific engager can be reversed without affecting its activity. Thus, a CD19 directed bispecific engager may have the configuration CD19×CD3 or CD3×CD19. In some embodiment, the APC is a hematopoietic cell. In some embodiments, the method further involves exposing the immune T cells to an agonist, such as an antibody (e.g., Utomilumab) or a ligand (41BBL), capable of activating a costimulatory receptor (e.g., CD28, 41BB, CD27 etc.) on T cells.

[0425] In some embodiment, the bispecific/multispecific engager comprises at least one (or first) binding domain capable of binding to and activating the T cell receptor (TCR) complex of T cells. In some embodiment, the bispecific/multispecific comprises at least one (or first) binding domain capable of binding to and activating the CD3 subunit of the TCR complex. In some embodiments, the bispecific/multispecific comprises at least one (or one) binding domain capable of binding to and activating the CD3-epsilon subunit of the TCR complex.

[0426] In some embodiments, the bispecific/multispecific engager comprises at least one (or first) binding domain capable of binding to and activating a receptor on the T cells that provides co-stimulation; i.e., a co-stimulatory receptor. Exemplary co-stimulatory receptor bound by the bispecific engager include CD28, CD137 (4-1BB), CD134 (OX40), Dap10, CD27, CD2, CD5, ICAM-1, LFA-1, TNFR-I, TNFR-II, Fas, CD30 and CD40.

[0427] In some embodiment, the bispecific/multispecific engager in the presence of APC or APS activates the signaling through the TCR complex. In some embodiment, the bispecific/multispecific engager in the presence of APC or APS activates T cells via signaling through a co-stimulatory receptor.

[0428] In some embodiment, the bispecific/multispecific engager comprises at least one (or second) binding domain capable of binding to the hematopoietic cells. In some embodiment, the bispecific/multispecific engager comprises at least one (or second) binding domain capable of binding to the lymphoid-lineage hematopoietic cells. In some embodiment, the bispecific/multispecific engager comprises at least one (or second) binding domain capable of binding to the B-lymphoid-lineage hematopoietic cells. Exemplary B-lineage lymphoid cells bound by the bispecific/multispecific engager, e.g., bispecific antibody, include immature B cells, mature B cells and plasma cells and combination thereof. In some embodiment, the bispecific/multispecific engager, e.g., bispecific antibody, comprises at least one (or second) binding domain capable of binding to an antigen expressed on B-lymphoid-lineage hematopoietic cells. Non-limiting examples of antigens bound by the second binding domain of the bispecific/multispecific engager, e.g., bispecific antibody, include CD19, CD20/MS4A1, CD22, CD23, BCMA, CS1/SLAMF7, CD30, CD32b, CD70, CD79b, CD123, CD33, CD138, CD179b, GPRC5D, Lyml, Lym2, and FCRH5.

[0429] In some embodiments, at least one (first) antigen binding domain of the bispecific/multispecific engager, e.g., bispecific antibody, binds to CD3e (or CD3ε) and the at least one other (or the second) antigen binding domain binds to CD19. In some embodiments, the bispecific/multispecific engager, e.g., bispecific antibody, is Blinatumomab. In some embodiment, the bispecific/multispecific engager, e.g., bispecific antibody, is a CD19×CD3 DART as described in Moore P A et al, Blood, 2011; 117(17):4542-4551.

[0430] In some embodiments, at least one (first) antigen binding domain of the bispecific/multispecific engager, e.g., bispecific antibody, binds to CD3e (or CD3ε) and the at least one other (or the second) antigen binding domain binds to CD22. In some embodiments, at least one (first) antigen binding domain of the bispecific/multispecific engager, e.g., bispecific antibody, binds to CD3e (or CD3ε) and the at least one other (or the second) antigen binding domain binds to CD20/MS4A1.

[0431] In some embodiments, at least one (first) antigen binding domain of the bispecific/multispecific engager, e.g., bispecific antibody, binds to CD3e (or CD3ε) and the at least one other (or the second) antigen binding domain binds to CD23.

[0432] In some embodiments, at least one (first) antigen binding domain of the bispecific/multispecific engager, e.g., bispecific antibody, binds to CD3e (or CD3ε) and the at least one other (or the second) antigen binding domain binds to BCMA. In some embodiments, the bispecific antibody is BI 836909 (AMG 420).

[0433] In some embodiments, at least one (first) antigen binding domain of the bispecific/multispecific engager, e.g., bispecific antibody, binds to CD3e (or CD3ε) and the at least one other (or the second) antigen binding domain binds to CS1/SLAMF7.

[0434] In some embodiments, at least one (first) antigen binding domain of the bispecific/multispecific engager, e.g., bispecific antibody, binds to CD3e (or CD3ε) and the at least one other (or the second) antigen binding domain binds to CD138.

[0435] In some embodiments, at least one (first) antigen binding domain of the bispecific/multispecific engager, e.g., bispecific antibody, binds to CD3e (or CD3ε) and the at least one other (or the second) antigen binding domain binds to CD123.

[0436] In some embodiments, at least one (first) antigen binding domain of the bispecific/multispecific engager, e.g., bispecific antibody, binds to CD3e (or CD3ε) and the at least one other (or the second) antigen binding domain binds to MPL. Table 7E provides the SEQ ID NOs of several bispecific antibodies whose first (or one of the) antigen binding domain binds to CD3e, CD28 or 41BB and whose second (or the other) antigen binding domain binds to different antigens, such as CD19, CD20/MS4A1, CD22, BCMA, CD33, CD123, MPL, Folate Receptor 1 etc.

[0437] In some embodiments, the activation and expansion of T cells involves exposing them to the bispecific/multispecific engager in the presence of a cell expressing a cognate ligand (e.g. an antigen) bound by at least one (second) antigen binding domain of the engager.

[0438] In some embodiments, the activation and expansion of T cells involves exposing them to the bispecific/multispecific engager in the presence of a solid substrate expressing a cognate ligand (e.g. an antigen or anti-idiotype antibody) bound by at least one (second) antigen binding domain of the engager.

[0439] In some embodiments, the method involves activation/expansion of immune T cells by exposing them to two different bispecific/multispecific engagers, e.g., bispecific antibodies, where at least one of the antigen binding domains of the first bispecific/multispecific engager, e.g., bispecific antibody, binds to and activates the T cell receptor (e.g., by binding to CD3ε) and at least one of the antigen binding domains of the second bispecific/multispecific engager, e.g., bispecific antibody, binds to and activates a costimulatory receptor (e.g., 41BB or CD28) and the at least one of antigen binding domains of the two bispecific/multispecific engagers, e.g., bispecific antibodies, binds to an antigen expressed on hematopoietic cells (e.g., CD19, CD22, CD20/MS4A1 and/or BCMA, etc.). In an exemplary embodiment, the method involves activation/expansion of immune T cells by exposing them to a CD19×CD3 and CD19×41BB bispecific antibodies in the presence of REC-1 cells.

[0440] In an alternate embodiment, the method involves activation/expansion of immune T cells by exposing them to a CD19×CD3 and CD22×CD28 bispecific antibodies in the presence of REC-1 cells. In another alternate embodiment, the method involves activation/expansion of immune T cells by exposing them to a CD20×CD3 and CD22×CD28 bispecific antibodies in the presence of REC-1 cells. Exemplary combinations of bispecific engagers, activating antibodies (e.g., CD3), APC, APS, and cytokines that can be used to activate immune cells, e.g., T cells, in various embodiments of the methods of the disclosure are presented in Table 17.

[0441] The aforesaid methods can be carried out in vitro, ex vivo or in vivo.

[0442] In some embodiments, the population of immune cells used in the methods described herein is acquired, e.g., obtained, from a blood sample from a subject (e.g., a cancer patient). In one embodiment, the population of immune cells is obtained by apheresis. In one embodiment, the population of immune cells is obtained by apheresis from a subject who has exercised or has been administered a CXCR4 antagonist (e.g, Plerixafor or Mozibil), a cytokine (e.g., G-CSF or GM-CSF), a Beta2 adregnergic agonist (e.g., epinephrine), a Tyrosine Kinase inhibitor (e.g., Dasatinib), a chemotherapy drug (e.g., Cyclophosphamide, doxorubicine), or a combination of the above.

[0443] In some embodiments, the immune cell population includes immune effector cells, e.g., as described herein. Exemplary immune effector cells include T cells, e.g., alpha/beta T cells and gamma/delta T cells, natural killer T (NKT) cells, bone marrow resident mono-nuclear cells, tissue resident mononuclear cells or a combination thereof.

[0444] In some embodiments, the immune cell population includes peripheral blood mononucleated cells (PBMCs), or cord blood cells, or a combination thereof.

[0445] In certain embodiments, the immune cell population includes primary T cells or subsets of lymphocytes, including, for example, anergized T cells, naive T cells, T-regulatory cells, Th-17 cells, stem T cells, tissue-resident T cells, tumor infilterating T cells or a combination thereof.

[0446] In certain embodiments, the immune cell population includes T cells that have been engineered to express a natural or a synthetic receptor targeting a specific antigen. An exemplary natural receptor includes a T cell receptor (TCR) targeting NY-ESO1 or WTI. Exemplary synthetic receptors include a CAR or a next generation CARS (e.g., K13-CAR, SIR, zSIR, Ab-TCR, TFP etc.) or a recombinant TCR (rTCR). Non-limiting exemplary target antigens that can be targeted by the T cells which are activated/expanded by the methods of the disclosure include: Mesothelin, epidermal growth factor receptor variant III (EGFRviii); ganglioside G2 (GD2); ganglioside GD3 (aNeu5Ac(2-8)aNeu5Ac(2-3)bDGalp(1-4)bDGlcp(1-1)Cer); Tn antigen ((Tn Ag) or (GalNAcα-Ser/Thr)); prostate-specific membrane antigen (PSMA); Receptor tyrosine kinase-like orphan receptor 1 (ROR1); Carcinoembryonic antigen (CEA); Epithelial cell adhesion molecule (EPCAM); B7H3 (CD276); KIT (CD117); Interleukin-13 receptor subunit alpha-2 (IL-13Ra2 or CD213A2); Interleukin 11 receptor alpha (IL-11Ra); prostate stem cell antigen (PSCA); vascular endothelial growth factor receptor 2 (VEGFR2); Lewis(Y) antigen; Stage-specific embryonic antigen-4 (SSEA-4); Folate receptor alpha (FRa or FR1); Folate receptor beta (FRb); Receptor tyrosine-protein kinase ERBB2 (Her2/neu); Mucin 1, cell surface associated (MUC1); epidermal growth factor receptor (EGFR); neural cell adhesion molecule (NCAM); Prostase; prostatic acid phosphatase (PAP); elongation factor 2 mutated (ELF2M); Ephrin B2; fibroblast activation protein alpha (FAP); insulin-like growth factor 1 receptor (IGF-I receptor), carbonic anhydrase IX (CA1X); tyrosinase; ephrin type-A receptor 2 (EphA2); sialyl Lewis adhesion molecule (sLe); ganglioside GM3 (aNeu5Ac(2-3)bDClalp(1-4)bDGlcp(1-1)Cer); transglutaminase 5 (TGS5); high molecular weight-melanoma associated antigen (HMWMAA); o-acetyl-GD2 ganglioside (OAcGD2); tumor endothelial marker 1 (TEM1/CD248); tumor endothelial marker 7-related (TEM7R); claudin 6 (CLDN6); thyroid stimulating hormone receptor (TSHR); G protein coupled receptor class C group 5, member D (GPRC5D); chromosome X open reading frame 61 (CXORF61); CD97; CD179a; anaplastic lymphoma kinase (ALK); Polysialic acid; placenta-specific 1 (PLAC1); hexasaccharide portion of globoH glycoceramide (GloboH); mammary gland differentiation antigen (NY-BR-1); uroplakin 2 (UPK2); Hepatitis A virus cellular receptor 1 (HAVCR1); adrenoceptor beta 3 (ADRB3); pannexin 3 (PANX3); G protein-coupled receptor 20 (GPR20); lymphocyte antigen 6 complex, locus K 9 (LY6K); Olfactory receptor 51E2 (OR5IE2); TCR Gamma Alternate Reading Frame Protein (TARP); Wilms tumor protein (WT1); Cancer/testis antigen 1 (NY-ESO-1); Cancer/testis antigen 2 (LAGE-1a); Melanoma-associated antigen 1 (MAGE-A1); CD19; CD20/MS4A1; CD123; CD22; CD23, CD30; CD33; CD171; CS-1 (also referred to as CD2 subset 1, CRACC, SLAMF7, TNF receptor family member B cell maturation (BCMA); CD319, and 19A24); C-type lectin-like molecule-1 (CLL-1 or CLECL1); Fins Like Tyrosine Kinase 3 (FLT3); Tumor-associated glycoprotein 72 (TAG72); CD38; CD44v6; a glycosylated CD43 epitope expersed on acute leukemia or lymphoma but not on hematopoietic progenitors, a glycosylated CD43 epitope expressed on non-hematopoietic cancers, Protease Serine 21 (Testisin or PRSS21); CD24; Platelet-derived growth factor receptor beta (PDGFR-beta); Proteasome (Prosome, Macropain) Subunit, Beta Type, 9 (LMP2); glycoprotein 100 (gp100); oncogene fusion protein consisting of breakpoint cluster region (BCR) and Abelson murine leukemia viral oncogene homolog 1 (Abl) (bcr-abl); ETS translocation-variant gene 6, located on chromosome 12p (ETV6-AML); sperm protein 17 (SPA17); X Antigen Family, Member 1A (XAGE1); angiopoietin-binding cell surface receptor 2 (Tie 2); melanoma cancer testis antigen-1 (MAD-CT-1); melanoma cancer testis antigen-2 (MAD-CT-2); Fos-related antigen 1; tumor protein p53 (p53); p53 mutant; prostein; surviving; telomerase; prostate carcinoma tumor antigen-1 (PCT A-1 or Galectin 8), melanoma antigen recognized by T cells 1 (MelanA or MARTI); Rat sarcoma (Ras) mutant; human Telomerase reverse transcriptase (hTERT); sarcoma translocation breakpoints; melanoma inhibitor of apoptosis (ML-IAP); ERG (transmembrane protease, serine 2 (TMPRSS2) ETS fusion gene); N-Acetyl glucosaminyl-transferase V (NA17); paired box protein Pax-3 (PAX3); Androgen receptor; Cyclin B1; v-myc avian myelocytomatosis viral oncogene neuroblastoma derived homolog (MYCN); Ras Homolog Family Member C (RhoC); Tyrosinase-related protein 2 (TRP-2); Cytochrome P450 1B 1 (CYP1B 1); CCCTC-Binding Factor (Zinc Finger Protein)-Like (BORIS or Brother of the Regulator ofimprinted Sites), Squamous Cell Carcinoma Antigen Recognized By T Cells 3 (SART3); Paired box protein Pax-5 (PAX5); proacrosin binding protein sp32 (OY-TES1); lymphocyte-specific protein tyrosine kinase (LCK); A kinase anchor protein 4 (AKAP-4); synovial sarcoma, X breakpoint 2 (SSX2); Receptor for Advanced Glycation Endproducts (RAGE-1); renal ubiquitous 1 (RU1); renal ubiquitous 2 (RU2); legumain; human papilloma virus E6 (HPV E6); human papilloma virus E7 (HPV E7); intestinal carboxyl esterase; heat shock protein 70-2 mutated (mut hsp70-2); CD79a; CD79b; CD72; Leukocyte-associated immunoglobulin-like receptor 1 (LAIR1); Fc fragment of IgA receptor (FCAR or CD89); Leukocyte immunoglobulin-like receptor subfamily A member 2 (LILRA2); CD300 molecule-like family member f (CD300LF); C-type lectin domain family 12 member A (CLEC12A); bone marrow stromal cell antigen 2 (BST2); EGF-like module-containing mucin-like hormone receptor-like 2 (EMR2); lymphocyte antigen 75 (LY75); Glypican-3 (GPC3); Fc receptor-like 5 (FCRL5); and immunoglobulin lambda-like polypeptide 1 (IGLL1), MPL, Biotin, c-MYC epitope Tag, CD34, LAMP1 TROP2, GFRalpha4, CDH17, CDH6, NYBR1, CDH19, CD200R, Slea (CA19.9; Sialyl Lewis Antigen); Fucosyl-GM1, PTK7, gpNMB, CDH1-CD324, DLL3, CD276/B7H3, IL11Ra, IL13Ra2, CD179b-IGL11, TCRgamma-delta, NKG2D, CD32 (FCGR2A), Tn ag, Tim1-/HVCR1, CSF2RA (GM-CSFR-alpha), TGFbetaR2, Lews Ag, TCR-beta1 chain, TCR-beta2 chain, TCR-gamma chain, TCR-delta chain, FITC, Leutenizing hormone receptor (LHR), Follicle stimulating hormone receptor (FSHR), Chorionic Gonadotropin Hormone receptor (CGHR), CCR4, GD3, SLAMF6, SLAMF4, HIV1 envelope glycoprotein, HTLV1-Tax, CMV pp65, EBV-EBNA3c, KSHV K8.1, KSHV-gH, influenza A hemagglutinin (HA), GAD, PDL1, GUANYLYL CYCLASE C (GCC), autoantibody to desmoglein 3 (Dsg3), MPL, autoantibody to desmoglein 1 (Dsg1), HLA, HLA-A, HLA-A2, HLA-B, HLA-C, HLA-DP, HLA-DM, HLA-DOA, HLA-DOB, HLA-DQ, HLA-DR, HLA-G, IGE, CD99, RAS G12V, TISSUE FAACTOR 1 (TF1), AFP, GPRC5D, CLAUDIN18.2 (CLD18A2 OR CLDN18A.2)), P-GLYCOPROTEIN, STEAPI, LIV1, NECTIN-4, CRIPTO, GPA33, BST1/CD157, LOW CONDUCTANCE CHLORIDE CHANNEL, VISTA, CD16ORF54, Muc5Ac, EMR2, Robo4, RNF43, CLDN6, MMP16, UPK1B, BMPR1B, Ly6E, STEAPI, WISP1, SLC34A2 and antigen recognized by TNT antibody.

[0447] In the preferred embodiment, the T cells are targeted against an antigen expressed in solid tumors (e.g., Mesothelin, EGFR viii, CHD6, CDH17, CDH19, DLL3, CLD18A2, ALK, CD276, CD324, B7H4, EGFR, EBNA3c, EpCaml, LlCAM, Folate Receptor 1, GFRa4, STEAPI, Livl, Nectin4, Cripto, gpA33, ILIRAP, GD2, GD3, gp100, ROR1, SLea, PTK7, Prolactin Receptor, LHR, TSHR, Lewis Y, Her2, GCC, SSEA4, IL-13Ra2, PSMA, PSCA, NY-ESO1, WT1, MART1, MAGE1, AFP, TIM1, TROP2, hTERT, MMP16, UPK1B, BMPR1B, Ly6E, STEAPI, WISP1, SLC34A2, VEGFR3, Tn-Muc1, and Tyrosinase etc.) and the bispecific/multispecific engager, e.g., bispecific antibody, targets an antigen expressed on B cells (e.g., CD19, CD22, CD20/MS4A1 etc.), plasma cells (e.g., BCMA, CD138, SLAMF7 etc.) and myeloid cells (e.g., CD123, MPL, CD33).

[0448] In some embodiments, the target antigen of the bispecific/multispecific engager, e.g., bispecific antibody, is expressed in a cell e.g., a cell expressing the cognate antigen on its surface. In one embodiment, the cognate antigen is heterologous to the cell, e.g., is a recombinant antigen expressed on the cell surface. In another embodiment, the cognate antigen is endogenously expressed on a cell, e.g., a tumor cell. In the aforesaid embodiments, the immune effector cell population can be expanded in vitro, ex vivo or in vivo. In one embodiment, T cells are expanded in vivo, e.g., by administration of the bispecific/multispecific engager, e.g., bispecific antibody, subcutaneously, intravenously or intratumorally.

[0449] In another embodiment, the target antigen of the bispecific/multispecific engager, e.g., bispecific antibody, is present on a non-cellular substrate. The non-cellular substrate can be a solid support chosen from, e.g., a plate (e.g., a microtiter plate), a membrane (e.g., a nitrocellulose membrane), a matrix, a chip or a bead. In embodiments, the target antigen of the bispecific/multispecific engager, e.g., bispecific antibody, molecule is present in the substrate (e.g., on the substrate surface). The target antigen can be immobilized, attached, or associated covalently or non-covalently (e.g., cross-linked) to the substrate. In one embodiment, the target antigen is attached (e.g., covalently attached) to a bead. The SEQ ID NO of several exemplary target antigens that can be attached to substrates are provided in Table 7D.

[0450] In one aspect, more than one target antigens are immobilized on beads, either on the same bead, i.e., “cis,” or to separate beads, i.e., “trans.” By way of example, the agent providing the primary activation signal in the presence of a CD19×CD3 bispecific antibody is CD19-extracellular domain (CD19-ECD) or fragment thereof and the agent providing the costimulatory signal is an anti-CD28 antibody; and both agents are co-immobilized to the same bead in equivalent molecular amounts. In one aspect, a 1:1 ratio of each agent bound to the beads for CD4+ T cell expansion and T cell growth is used. In certain aspects of the disclosure, a ratio of the two agents bound to the beads is used such that an increase in T cell expansion is observed in the presence of CD19×CD3 bispecific antibody as compared to the expansion observed using a ratio of 1:1. In one particular aspect an increase of from about 1 to about 3 fold is observed as compared to the expansion observed using a ratio of 1:1. In one aspect, the ratio of the two agents bound to the beads ranges from 100:1 to 1:100 and all integer values there between. In one aspect, more anti-CD28 antibody is bound to the particles than CD19-ECD, i.e., the ratio of CD19-ECD:CD28 antibody is less than one. In certain aspects, the ratio of anti CD28 antibody to CD19-ECD bound to the beads is greater than 2:1. In one particular aspect, a 1:100 CD19-ECD:CD28 antibody ratio of agents bound to beads is used.

[0451] Ratios of particles to cells from 1:500 to 500:1 and any integer values in between may be used to stimulate T cells or other target cells. As those of ordinary skill in the art can readily appreciate, the ratio of particles to cells may depend on particle size relative to the target cell.

[0452] For example, small sized beads could only bind a few cells, while larger beads could bind many. In certain aspects the ratio of cells to particles ranges from 1:100 to 100:1 and any integer values in-between and in further aspects the ratio comprises 1:9 to 9:1 and any integer values in between, can also be used to stimulate T cells. The ratio of CD19-ECD- and anti-CD28-coupled particles to T cells that result in T cell stimulation in the presence of an exemplary CD19×CD3 bispecific antibody can vary as noted above, however certain preferred values include 1:100, 1:50, 1:40, 1:30, 1:20, 1:10, 1:9, 1:8, 1:7, 1:6, 1:5, 1:4, 1:3, 1:2, 1:1, 2:1, 3:1,4:1, 5:1, 6:1,7:1, 8:1, 9:1, 10:1, and 15:1 with one preferred ratio being at least 1:1 particle per T cell. In one aspect, a ratio of particles to cells of 1:1 or less is used. In one particular aspect, a preferred particle: cell ratio is 1:5. In further aspects, the ratio of particles to cells can be varied depending on the day of stimulation. For example, in one aspect, the ratio of particles to cells is from 1:1 to 10:1 on the first day and additional particles are added to the cells every day or every other day thereafter for up to 10 days, at final ratios of from 1:1 to 1:10 (based on cell counts on the day of addition). In one particular aspect, the ratio of particles to cells is 1:1 on the first day of stimulation and adjusted to 1:5 on the third and fifth days of stimulation. In one aspect, particles are added on a daily or every other day basis to a final ratio of 1:1 on the first day, and 1:5 on the third and fifth days of stimulation. In one aspect, the ratio of particles to cells is 2:1 on the first day of stimulation and adjusted to 1:10 on the third and fifth days of stimulation. In one aspect, particles are added on a daily or every other day basis to a final ratio of 1:1 on the first day, and 1:10 on the third and fifth days of stimulation. One of skill in the art will appreciate that a variety of other ratios may be suitable for use in the disclosure. In particular, ratios will vary depending on particle size and on cell size andtype. In one aspect, the most typical ratios for use are in the neighborhood of 1:1, 2:1 and 3:1 on the first day.

[0453] In further aspects, the cells, such as T cells, are combined with agent-coated beads, the beads and the cells are subsequently separated, and then the cells are cultured. In an alternative aspect, prior to culture, the agent-coated beads and cells are not separated but are cultured together. In a further aspect, the beads and cells are first concentrated by application of a force, such as a magnetic force, resulting in increased ligation of cell surface markers, thereby inducing cell stimulation.

[0454] By way of example, cell surface proteins may be ligated by allowing paramagnetic beads to which CD19-ECD and anti-CD28 are attached (CD19-ECD×CD28 beads) to contact the T cells. In one aspect the cells (for example, 10⁴ to 10⁹ T cells) and beads (at a ratio of 1:1) are combined in a buffer, for example PBS (without divalent cations such as, calcium and magnesium). Again, those of ordinary skill in the art can readily appreciate any cell concentration may be used. For example, the target cell may be very rare in the sample and comprise only 0.01% of the sample or the entire sample (i.e., 100%) may comprise the target cell of interest. Accordingly, any cell number is within the context of the disclosure. In certain aspects, it may be desirable to significantly decrease the volume in which particles and cells are mixed together (i.e., increase the concentration of cells), to ensure maximum contact of cells and particles. For example, in one aspect, a concentration of about 10 billion cells/ml, 9 billion/ml, 8 billion/ml, 7 billion/ml, 6 billion/ml, 5 billion/ml, or 2 billion cells/ml is used. In one aspect, greater than 100 million cells/ml is used. In a further aspect, a concentration of cells of 10, 15, 20, 25, 30, 35, 40, 45, or 50 million cells/ml is used. In yet one aspect, a concentration of cells from 75, 80, 85, 90, 95, or 100 million cells/ml is used. In further aspects, concentrations of 125 or 150 million cells/ml can be used. Using high concentrations can result in increased cell yield, cell activation, and cell expansion. Further, use of high cell concentrations allows more efficient capture of cells that may weakly express target antigens of interest, such as CD28-negative T cells. Such populations of cells may have therapeutic value and would be desirable to obtain in certain aspects. For example, using high concentration of cells allows more efficient selection of CD8+ T cells that normally have weaker CD28 expression.

[0455] In one embodiment, cells transduced with a nucleic acid encoding a CAR, e.g., a CAR described herein, are expanded, e.g., by a method described herein. In one embodiment, the cells are expanded in culture for a period of several hours (e.g., about 2, 3, 4, 5, 6, 7, 8, 9, 10, 15, 18, 21 hours) to about 14 days (e.g., 1, 2, 3, 4, 5, 6, 7, 8, 9, 10, 11, 12, 13 or 14 days). In one embodiment, the cells are expanded for a period of 4 to 9 days. In one embodiment, the cells are expanded for a period of 8 days or less, e.g., 7, 6 or 5 days. In one embodiment, the cells, e.g., a CD19 CAR cell described herein, are expanded in culture for 5 days, and the resulting cells are more potent than the same cells expanded in culture for 9 days under the same culture conditions. Potency can be defined, e.g., by various T cell functions, e.g. proliferation, target cell killing, cytokine production, activation, migration, or combinations thereof. In one embodiment, the cells, e.g., a CD19 CAR cell described herein, expanded for 5 days show at least a one, two, three or four-fold increase in cells doublings upon antigen stimulation as compared to the same cells expanded in culture for 9 days under the same culture conditions. In one embodiment, the cells, e.g., the cells expressing a CD19 CAR described herein, are expanded in culture for 5 days, and the resulting cells exhibit higher proinflammatory cytokine production, e.g., IFN-γ and/or GM-CSF levels, as compared to the same cells expanded in culture for 9 days under the same culture conditions. In one embodiment, the cells, e.g., a CD19 CAR cell described herein, expanded for 5 days show at least a one, two, three, four, five, ten fold or more increase in pg/ml of proinflammatory cytokine production, e.g., IFN-γ and/or GM-CSF levels, as compared to the same cells expanded in culture for 9 days under the same culture conditions.

[0456] In the aforesaid embodiments, the immune cell population can be expanded in vitro or ex vivo.

[0457] In other embodiments, the strength of the immune cell stimulation in vitro is customized to a desired level, e.g., by adjusting one or more of: dose of the bispecific/multispecific engager, e.g., bispecific antibody, dose of the substrate expressing the target antigen (e.g., number of beads or cells expressing the CD19 antigen; density of the target antigen on the substrate, duration of exposure of the T cells to the bispecific/multispecific engager, affinity of the bispecific/multispecific engager, e.g., bispecific antibody for the target antigen.

[0458] In one embodiment, the immune cells are cultured ex vivo in the presence of the bispecific/multispecific engager, e.g., bispecific antibody and the substrate (e.g., cells or beads) expressing the cognate ligand (e.g., an antigen or an anti-idiotype antibody) of the bispecific antibody for a predetermined period (e.g., about 1, 2, 3, 4, 5, 6, 7, 8, 9, 10, 15, 18, 21, 22, 23 or 24 hours) or (e.g., 1, 5, 10, 15, 20, 25, 30, 35, 40, 45 or 50 days). In one embodiment, the immune cells are cultured for a period of 4 to 9 days. In one embodiment, the immune-expressing cells are cultured for a period of 8 days or less, e.g., 7, 6 or 5 days.

[0459] In one embodiment, the immune T cells activated/expanded ex vivo in the presence of at least 0.1 μg/ml, 0.5 μg/ml, 1 μg/ml, 10 μg/ml, 100 μg/ml, 1 ng/ml, 10 ng/ml, 50 ng/ml, 100 ng/ml, 500 ng/ml, 1000 ng/ml or 5000 ng/ml of the bispecific/multispecific engager, e.g., bispecific antibody.

[0460] In one embodiment, the immune effector T cells are activated/expanded ex vivo in the presence of the bispecific/multispecific engager, e.g., bispecific antibody, and cognate antigen expressing target cells at an Effector:Target ratio of about 0.1:1, 0.5:1, 1:1, 5:1, 10:1, 20:1 or 50:1.

[0461] In one embodiment, the immune effector T cells are activated/expanded ex vivo in the presence of the bispecific/multispecific engager, e.g., bispecific antibody, and cognate antigen expressing beads at an Effector:Bead ratio of about 0.1:1, 0.2:1, 0.5:1, 1:1, 2:1, 5:1, 10:1, 20:1 or 50:1.

[0462] In some embodiment, the immune cell population shows at least 2, 3, 4, 5, 6, 7, 8, 9, 10, 11 or 12 or higher population doublings when exposed to bispecific/multispecific engager, e.g, a bispecific antibody, and its target antigen-expressing substrate (e.g., cells or beads). In one embodiment, the immune cell population shows a total of 8-10, or about 9 population doublings.

[0463] In one embodiment, the immune T cell population expands to a total of 10-, 50-, 100-, 200-, 300-, 400-, 450-, 500-, 550-, 600-, 750-fold or higher expansion per cell. In one embodiment, the immune T cell population are expanded about 500-fold. In one embodiment, an average cell multiplies to over 400-600, or about 500 cells. In some embodiments, the cell expansion is measured by a method described herein, such as flow cytometry. In one embodiment, the cell expansion is measured at about 5, 10, 15, 20, 25, 30, 35, 40, 45, or 50 days after stimulation with the bispecific antibody in the presence of the target antigen of the bispecific antibody. In one embodiment, the cell expansion is measured between 10 and 25 days after stimulation with the bispecific antibody and the target antigen of the bispecific antibody. In one embodiment, the expansion is measured 8, 9, 10, 11, 12, 13, 14, 15, 16, 17, 18, 19, 20, 21, 22, 23, 24, or 25 days after stimulation with the bispecific antibody and the target antigen of the bispecific antibody.

[0464] In one embodiment, the immune cells are activated/expanded in vivo by the administration of the bispecific/multispecific engager, e.g., bispecific antibody, for a predetermined period (e.g., about 1, 2, 3, 4, 5, 6, 7, 8, 9, 10, 15, 18, 21, 22, 23 or 24 hours) or (e.g., 1, 5, 10, 15, 20, 25, 30, 35, 40, 45, 50, 60, 70, 90, 100, 120 days). In one embodiment, the immune T cells are expanded in vivo for a period of 2 to 20 days. In one embodiment, the immune T cells are expanded for a period of 12 days or less, e.g., 10, 7, 6 or 5 days. In one embodiment, bispecific antibody is administered in multiple cycles of 1-28 days followed by a rest period of 1-14 days.

[0465] In other embodiments, the bispecific/multispecific antibody can be used for activation and/or expansion of immune cells (e.g., T cell, NK cells, TILs etc.) in vivo. The strength of the immune cell stimulation in vivo is customized to a desired level, e.g., by adjusting one or more of: dose of the bispecific antibody, duration of exposure (e.g, duration of infusion) of the bispecific antibody, frequency of administration of the bispecifc antibody, half-life of the bispecific antibody, affinity of the bispecific antibody for the target antigen. For example, increasing the dose of the bispecific antibody may increase the stimulation and expansion of T cells, including engineered T cells. Alternatively, interrupting the administration of the bispecific antibody would be expected to decrease the stimulation and expansion of T cells, including engineered T cells.

[0466] In one embodiment, the bispecific/multispecific engager, e.g., bispecific antibody, is administered by continuous infusion. In one embodiment, the bispecific/multispecific engager, e.g., bispecific antibody, is administered by injection intravenously, subcutaneously, transdermally, and/or intramuscularly.

[0467] In one embodiment, the immune effector cells and the bispecific/multispecific engager, e.g., bispecific antibody, are administered to the subject after administration of lymphodepleting chemotherapy. Several lymphodepleting chemotherapy regimens are known in the art. An exemplary lymphodepleting chemotherapy regimen includes 30 mg/m2/day fludarabine intravenously plus 500 mg/m2/day cyclophosphamide intravenously x 3 days. In an exemplary embodiment, the immune effector cells are administered to the patient 1 day after finishing the administration of the lymphodepleting chemotherapy. In an exemplary embodiment, the immune effector cells are administered to the patient 2 day after finishing the administration of the lymphodepleting chemotherapy. The bispecific/multispecific engager, e.g., bispecific antibody, can be administered to the subject concurrently with the administration of the immune effector cells, prior to the administration of the immune effector cells or after the administration of the immune effector cells. In the preferred embodiment, the bispecific/multispecific engager, e.g., bispecific antibody, is administered to the subject after the administration of the immune effector cells.

[0468] In an exemplary embodiment, the bispecific/multispecific engager, e.g., bispecific antibody, is Blinatumomb (BLINCYTO) and Blinatumomab is administered to the subject as a continuous intravenous infusion at a constant flow rate using an infusion pump which is programmable, lockable, non-elastomeric, and has an alarm as described in its prescribing information. In an exemplary embodiment, Blinatumomab is administered at a dose of 1 mcg/day, 2 mcg/day, 5 mcg/day, 10 mcg/day, 20 mcg/day, 25 mcg/day, 28 mcg/day, 30 mcg/day or 50 mcg/day by continuous infusion. In the preferred embodiment, Blinatumomab is administered after premedication with prednisone 100 mg intravenously or equivalent (e.g., dexamethasone 16 mg) 1 hour prior to the first dose of BLINCYTO in each cycle.

[0469] The in vivo administration of the suitable composition of the bispecific antibody may be effected by different ways, e.g., by intravenous, intraperitoneal, subcutaneous, intramuscular, topical or intradermal administration. In particular, the disclosure provides for an uninterrupted administration of the suitable composition. As a non-limiting example, uninterrupted, i.e. continuous administration may be realized by a small pump system worn by the patient for metering the influx of therapeutic agent into the body of the patient. The pharmaceutical composition comprising the bispecific/multispecific engager, e.g., bispecific antibody, can be administered by using said pump systems. Such pump systems are generally known in the art, and commonly rely on periodic exchange of cartridges containing the therapeutic agent to be infused. When exchanging the cartridge in such a pump system, a temporary interruption of the otherwise uninterrupted flow of therapeutic agent into the body of the patient may ensue. In such a case, the phase of administration prior to cartridge replacement and the phase of administration following cartridge replacement would still be considered within the meaning of the pharmaceutical means and methods of the disclosure together make up one “uninterrupted administration” of such therapeutic agent.

[0470] The continuous or uninterrupted administration of the bispecific/multispecific engager, e.g., bispecific antibody, described herein may be intravenous or subcutaneous by way of a fluid delivery device or small pump system including a fluid driving mechanism for driving fluid out of a reservoir and an actuating mechanism for actuating the driving mechanism. Pump systems for subcutaneous administration may include a needle or a cannula for penetrating the skin of a patient and delivering the suitable composition into the patient's body. Said pump systems may be directly fixed or attached to the skin of the patient independently of a vein, artery or blood vessel, thereby allowing a direct contact between the pump system and the skin of the patient. The pump system can be attached to the skin of the patient for 24 hours up to several days. The pump system may be of small size with a reservoir for small volumes. As a non-limiting example, the volume of the reservoir for the suitable pharmaceutical composition to be administered can be between 0.1 and 50 ml.

[0471] The continuous administration may be transdermal by way of a patch worn on the skin and replaced at intervals. One of skill in the art is aware of patch systems for drug delivery suitable for this purpose. It is of note that transdermal administration is especially amenable to uninterrupted administration, as exchange of a first exhausted patch can advantageously be accomplished simultaneously with the placement of a new, second patch, for example on the surface of the skin immediately adjacent to the first exhausted patch and immediately prior to removal of the first exhausted patch. Issues of flow interruption or power cell failure do not arise.

[0472] The inventive compositions may further comprise a pharmaceutically acceptable carrier. Examples of suitable pharmaceutical carriers are well known in the art and include solutions, e.g. phosphate buffered saline solutions, water, emulsions, such as oil/water emulsions, various types of wetting agents, sterile solutions, liposomes, etc. Compositions comprising such carriers can be formulated by well known conventional methods. Formulations can comprise carbohydrates, buffer solutions, amino acids and/or surfactants. Carbohydrates may be non-reducing sugars, preferably trehalose, sucrose, octasulfate, sorbitol or xylitol. In general, as used herein, “pharmaceutically acceptable carrier” means any and all solvents, dispersion media, coatings, antibacterial and antifungal agents, isotonic and absorption delaying agents, compatible with pharmaceutical administration. The use of such media and agents for pharmaceutically active substances is well known in the art.

[0473] Acceptable carriers, excipients, or stabilizers are nontoxic to recipients at the dosages and concentrations employed and include: additional buffering agents; preservatives; co-solvents; antioxidants, including ascorbic acid and methionine; chelating agents such as EDTA; metal complexes (e.g., Zn-protein complexes); biodegradable polymers, such as polyesters; salt-forming counter-ions, such as sodium, polyhydric sugar alcohols; amino acids, such as alanine, glycine, asparagine, 2-phenylalanine, and threonine; sugars or sugar alcohols, such as trehalose, sucrose, octasulfate, sorbitol or xylitol stachyose, mannose, sorbose, xylose, ribose, myoinisitose, galactose, lactitol, ribitol, myoinisitol, galactitol, glycerol, cyclitols (e.g., inositol), polyethylene glycol; sulfur containing reducing agents, such as glutathione, thioctic acid, sodium thioglycolate, thioglycerol, [alpha]-monothioglycerol, and sodium thio sulfate; low molecular weight proteins, such as human serum albumin, bovine serum albumin, gelatin, or other immunoglobulins; and hydrophilic polymers, such as polyvinylpyrrolidone.

[0474] Such formulations may be used for continuous administrations which may be intravenuous or subcutaneous with and/or without pump systems. Amino acids may be charged amino acids, preferably lysine, lysine acetate, arginine, glutamate and/or histidine. Surfactants may be detergents, preferably with a molecular weight of >1.2 KD and/or a polyether, preferably with a molecular weight of >3 KD. Non-limiting examples for preferred detergents are Tween 20, Tween 40, Tween 60, Tween 80 or Tween 85. Non-limiting examples for preferred polyethers are PEG 3000, PEG 3350, PEG 4000 or PEG 5000. Buffer systems used in the disclosure can have a preferred pH of 5-9 and may comprise citrate, succinate, phosphate, histidine and acetate.

[0475] The compositions of the disclosure comprising the bispecific/multispecific engager, e.g., bispecific antibody, in a single or separate formulations can be administered to the subject at a suitable dose which can be determined e.g. by dose escalating studies by administration of increasing doses of the polypeptide described herein to non-chimpanzee primates, for instance macaques. The composition or these compositions can also be administered in combination with additional other proteinaceous and non-proteinaceous drugs and cellular therapy products. These drugs may be administered simultaneously with the composition comprising the bispecific/multispecific engagers described herein as defined herein or separately before or after administration of said bispecific/multispecific engagers in timely defined intervals and doses. The dosage regimen will be determined by the attending physician and clinical factors. As is well known in the medical arts, dosages for any one patient depend upon many factors, including the patient's size, body surface area, age, the particular compound to be administered, sex, time and route of administration, general health, and other drugs being administered concurrently.

[0476] Preparations for parenteral administration include sterile aqueous or non-aqueous solutions, suspensions, and emulsions. Examples of non-aqueous solvents are propylene glycol, polyethylene glycol, vegetable oils such as olive oil, and injectable organic esters such as ethyl oleate. Aqueous carriers include water, alcoholic/aqueous solutions, emulsions or suspensions, including saline and buffered media. Parenteral vehicles include sodium chloride solution, Ringer's dextrose, dextrose and sodium chloride, lactated Ringer's, or fixed oils. Intravenous vehicles include fluid and nutrient replenishers, electrolyte replenishers (such as those based on Ringer's dextrose), and the like. Preservatives and other additives may also be present such as, for example, antimicrobials, anti-oxidants, chelating agents, inert gases and the like. In addition, the composition of the disclosure, e.g., bispecific/multispecific engagers might comprise proteinaceous carriers, like, e.g., serum albumin or immunoglobulin, preferably of human origin. It is envisaged that the composition of the disclosure might comprise, in addition to the polypeptide described herein, further biologically active agents, depending on the intended use of the composition. Such agents might be drugs acting on the gastro-intestinal system, drugs acting as cytostatica, drugs preventing hyperuricemia, drugs inhibiting immunoreactions (e.g. corticosteroids), drugs modulating the inflammatory response, drugs acting on the circulatory system and/or agents such as cytokines known in the art. It is also envisaged that the composition of the disclosure comprising the bispecific/multispecific engager in a single or separate formulations is applied in an additional co-therapy, i.e., in combination with another anti-cancer medicament.

[0477] In certain embodiments, the methods disclosed herein further include contacting the immune cell population with a nucleic acid encoding a CAR (including next generation a CAR, such as K13-CAR, SIR, Ab-TCR, TFP etc.) or a TCR molecule, e.g., a vector comprising a nucleic acid encoding a CAR or a TCR, thereby producing a CAR or a TCR-expressing cell population. In certain embodiments, the immune cell population is activated/expanded by the bispecific/multispecific engager, e.g., a bispecific antibody, in the presence of its target antigen (e.g., Blinatumomab in the presence of CD19+ B cells) first and is then followed by contact with nucleic acid encoding a CAR (including next generation a CAR, such as K13-CAR, SIR, Ab-TCR, TFP etc.) or a TCR molecule.

[0478] In certain embodiments, the immune cell population is activated/expanded by the bispecific/multispecific engager, e.g., a bispecific antibody, in the presence of its target antigen (e.g., Blinatumomab in the presence of CD19+ B cells) after contact with nucleic acid encoding a CAR (including next generation a CAR, such as K13-CAR, SIR, Ab-TCR, TFP etc.) or a TCR molecule. In certain embodiments, the immune cell population is activated/expanded by the bispecific/multispecific engager, e.g., a bispecific antibody, in the presence of its target antigen (e.g., Blinatumomab in the presence of CD19+ B cells) concurrently with contact with nucleic acid encoding a CAR (including next generation a CAR, such as K13-CAR, SIR, Ab-TCR, TFP etc.) or a TCR molecule.

[0479] The steps of activation/expansion by the bispecific/multispecific engager, e.g., a bispecific antibody, plus its cognate antigen and contact with nucleic acid encoding a CAR (including next generation a CAR, such as K13-CAR, SIR, Ab-TCR, TFP etc.) or a TCR may occur in vitro, ex vivo, in vivo or in various combination. In certain embodiments, immune T cells are activated/expanded by the bispecific/multispecific engager, e.g., a bispecific antibody, in the presence of its target antigen in vitro and contacted with nucleic acid encoding a CAR (including next generation a CAR, such as K13-CAR, SIR, Ab-TCR, TFP etc.) or a TCR molecule in vitro. In certain embodiments, immune T cells are activated/expanded by the bispecific/multispecific engager, e.g., a bispecific antibody, in the presence of its target antigen both in vitro and in vivo and contacted with nucleic acid encoding a CAR (including next generation a CAR, such as K13-CAR, SIR, Ab-TCR, TFP etc.) or a TCR molecule in vitro. In certain embodiments, immune T cells are activated/expanded by the bispecific/multispecific engager, e.g., a bispecific antibody, in the presence of its target antigen both in vitro and in vivo and contacted with nucleic acid encoding a CAR or a TCR molecule in vivo. In one embodiment, immune T cells are activated/expanded by the bispecific/multispecific engager, e.g., a bispecific antibody, in the presence of its target antigen (cognate ligand) and a ligand or an agonist antibody directed against a costimulatory molecule. Exemplary costimulatory molecules include 41BB, CD28 and CD27. In one embodiment, the agonist 41BB antibody is Utomilumab. In one embodiment, immune T cells are activated/expanded by the exposing them to Blinatumomb and Utomilumab in the presence of CD19 expressing B cells. In one embodiment, immune T cells are activated/expanded by administering Blinatumomb and Utomilumab to the subject.

[0480] In one embodiment, the nucleic acid encoding the CAR/TCR molecule is selected from the group consisting of a DNA, an RNA, a plasmid, a lentivirus vector, adenoviral vector, or a retrovirus vector. In one embodiment, the nucleic acid encoding the CAR (including next generation a CAR, such as K13-CAR, SIR, Ab-TCR, TFP etc.) or a TCR molecule vector is a lentivirus.

[0481] In other embodiments, the nucleic acid encoding a CAR (including next generation a CAR, such as K13-CAR, SIR, Ab-TCR, TFP etc.) or a TCR molecule is an IVT RNA.

[0482] In some embodiment, the bispecific/multispecific engager, e.g., a bispecific antibody, and the CAR molecules are directed to the same antigen, e.g., the same tumor cell antigen. In such embodiments, the immune cell population is expanded and/or activated in vitro or ex vivo, e.g., by contacting said immune cell population with the antigen targeted by the second antigen binding domain of the bispecific antibody or an anti-idiotypic antibody (e.g., a CD19-antigen or anti-CD19 idiotypic antibody immobilized onto a non-cellular or cellular substrate as described herein).

[0483] Alternatively, or in combination, the immune cell population is expanded and/or activated in vivo, e.g. by contacting an endogenous cell antigen (e.g., CD19). Alternatively, or in combination, the immune cell population is exposed to the bispecific/multispecific engager, e.g., a bispecific antibody, ex vivo and then activated by infusion in vivo, e.g. by contacting an endogenous cell antigen (e.g., CD19). In one embodiment, the immune cell is administered to a subject, e.g., as part of a therapeutic protocol.

[0484] In other embodiments, the bispecific/multispecific engager, e.g., a bispecific antibody, and the CAR/TCR molecules are directed to different antigens, e.g., different tissue and/or tumor cell antigens. In such embodiments, the immune cell population is expanded and/or activated in vitro or ex vivo, e.g., by contacting said immune cell population with the antigen targeted by the second antigen binding domain of the bispecific antibody or an anti-idiotypic antibody (e.g., a CD19-antigen or anti-CD19 idiotypic antibody immobilized onto a non-cellular or cellular substrate as described herein). Alternatively, or in combination, the immune cell population is expanded and/or activated in vivo, e.g. by contacting an endogenous cell antigen (e.g., CD19). Alternatively, or in combination, the immune cell population is exposed to the bispecific/multispecific engager, e.g., a bispecific antibody, ex vivo and then activated by infusion in vivo, e.g. by contacting an endogenous cell antigen (e.g., CD19). In one embodiment, the immune cell is administered to a subject, e.g., as part of a therapeutic protocol.

[0485] In one embodiment, the antigen bound by at least one of antigen binding domains of the bispecific/multispecific engager, e.g., a bispecific antibody, is chosen from CD19, CD20/MS4A1, CD22, CD23, CD123, FLT3, BCMA, CS1/SLAMF7, CD30, CD32b, CD70, CD79b, CD123, CD138, CD179b, GPRC5D, Lyml, Lym2, and FCRH5 and CAR/TCR targets an antigen chosen from Mesothelin, EGFR viii, CHD6, CDH17, CDH19, DLL3, CLD18A2, ALK, CD276, CD324, B7H4, EGFR, EBNA3c, EpCaml, LlCAM, Folate Receptor 1, GFRa4, STEAPI, Livl, Nectin4, Cripto, gpA33, ILIRAP, GD2, GD3, gp100, ROR1, SLea, PTK7, Prolactin Receptor, LHR, TSHR, Lewis Y, Her2, GCC, SSEA4, IL-13Ra2, PSMA, PSCA, NY-ESO1, WT1, MART1, MAGE1, AFP, TIM1, TROP2, hTERT, MMP16, UPK1B, BMPR1B, Ly6E, STEAPI, WISP1, SLC34A2, VEGFR3, Tn-Mucd, and Tyrosinase.

[0486] In other embodiments, the immune cells express more than CAR or TCRs. In other embodiments, the immune cells may express accessory module that modulate the activity of CAR or TCR. Exemplary accessory modules include vFLIP K13, vFLIP MC159, NEMO-K277A, and constitutive active mutants of JAK1, JAK3, STAT5b and BRAF. In other embodiments, the immune cells may express an inhibitor of one or more genes from the group of BRD9, EZH2, MLL2, MLL3, MLL4, methylcytosine dioxygenase genes (e.g., Tet1, Tet2, Tet3), ATM, CHEK, FBXW10, BCOR, FAT1, ASXL1, PHF6, SF3B1, YY1, CBFb, Runx1, EHMT2 (G9A), SMARCA4, CREBBP, PRDM1/BLIMP1, HDAC2, TRAIL (TNFSF10) and Death Receptor 5 (DR5 or TNFRSF10B).

[0487] In certain embodiments, the methods further comprise storing the expanded and/or activated immune cell population after the appropriate expansion period and/or contact with nucleic acid encoding a CAR and/or TCR. In one embodiment, the expanded and/or activated and/or CAR/TCR expressing immune cell population is cryopreserved according to a method described herein. In one embodiment, the expanded and/or activated and/or CAR/TCR expressing immune cell population is cryopreserved in an appropriate media, e.g., an infusible media, e.g., as described herein.

[0488] In another aspect, the disclosure features a method of treating a disorder or condition (e.g., a disorder or condition as described herein), in a subject. The method includes administering to the subject an expanded and/or activated immune cell population made according to one or more of the methods described herein. In embodiments, the method includes acquiring (e.g., obtaining) the expanded and/or activated immune cell population. The expanded and/or activated immune cell population can be obtained from a suitable storage condition, e.g., cryopreservation.

[0489] In some embodiments, the immune cell population includes immune effector cells, e.g., a described herein. Exemplary immune effector cells include T cells, e.g., alpha/beta T cells and gamma/delta T cells, and natural killer T (NKT) cells.

[0490] In yet another aspect the disclosure features a method of treating, or providing anti-tumor immunity to, a subject having a cancer. The method includes administering to the subject an effective amount of an immune effector T cell population (e.g., an expanded and/or activated immune cell population as described herein) that optionally expresses a CAR and/or exogenous TCR molecule (e.g., a first and/or second CAR/TCR molecule as described herein), alone or in combination with an additional therapy, e.g., a second therapy as described herein.

[0491] In some embodiments, the treatment method includes acquiring (e.g., obtaining) the expanded and/or activated immune cell population using one or more of the methods described herein. For example, the expanded and/or activated immune cell population may have been previously obtained by using Plerixafor-mobilized T cells, introducing a CAR molecule (e.g., a nucleic acid molecule encoding the CAR molecule as described herein, e.g., an IVT RNA encoding the first CAR) under conditions suitable for expression of the CAR molecule; and contacting said CAR-expressing cell population with a bispecific/multispecific engager, e.g., a bispecific antibody, described herein in the presence of the target antigen expressing cell/substrate of the bispecific antibody, e.g., a cell/substrate that expresses the target antigen bound by at least one antigen binding domains of the bispecific/multispecific engager, e.g., a bispecific antibody, (e.g., a cognate antigen molecule (e.g., a recombinant antigen) or an anti-idiotypic antibody molecule), under conditions such that immune cell expansion and/or activation occurs. In embodiments, the target antigen of the bispecific/multispecific engager, e.g., a bispecific antibody, is present in/on (e.g., immobilized or attached to) a substrate, e.g., a non-naturally occurring substrate, as described herein. The expanded and/or activated immune cell population can be stored under suitable conditions, e.g., cryopreservation, as described herein.

[0492] In one exemplary embodiment, the CAR is directed to mesothelin (e.g., a CAR represented by SEQ ID NO: 2832) and the mesothelin CAR-expressing cell is contacted with Blinatumomab (a CD19×CD3 bispecific antibody) in the presence of CD19 expressing B cells. In one exemplary embodiment, the CAR is directed to mesothelin and the mesothelin CAR-expressing cell is contacted with CD19×CD3 DART in the presence of CD19 expressing B cells. In an ememplary embodiment, the CD19-expressing cell is anormal peripheral blood B lymphocyte or a CD19-expressing cell line. Exemplary CD19+ cell lines that can be used in vitro for expansion of T cells in the presence of a CD19×CD3 bispecific engager include REC-1, JEKO-1, GRANTA-519, MINO, Nalm6 and RAJI cell lines. A preferred CD19+ cell line that can be used in vitro for expansion of T cells in the presence of a CD19×CD3 bispecific engager is REC-1. In one exemplary embodiment, the CAR is directed to mesothelin and the mesothelin CAR-expressing cell is contacted with BCMA x CD3 DART in the presence of BCMA expressing cells. A preferred BCMA+ cell line that can be used in vitro for expansion of T cells in the presence of a BCMA x CD3 bispecific engager, e.g., a BCMA x CD3 DART is REC-1. In one exemplary embodiment, the CAR is directed to mesothelin and the mesothelin CAR-expressing cell is contacted with CD123×CD3 DART in the presence of CD123 expressing blood cells. In one exemplary embodiment, the CAR is directed to Her2 (e.g. a CAR represented by SEQ ID NO: 2831) and the Her2 CAR-expressing cell is contacted with Blinatumomab (a CD19×CD3 bispecific antibody) in the presence of CD19 expressing B cells or B cell line, e.g., REC-1. In one exemplary embodiment, the CAR is directed to Prolactin Receptor and the Prolactin Receptor CAR-expressing cell is contacted with Blinatumomab (a CD19×CD3 bispecific antibody) in the presence of CD19-expressing B cells. In one exemplary embodiment, the CAR is directed to ROR1 and the ROR1CAR-expressing cell is contacted with Blinatumomab (a CD19×CD3 bispecific antibody) in the presence of CD19 expressing B cells. In another exemplary embodiment, the CAR is directed to AFP/MHC I complex and the AFP-CAR-expressing T cell is contacted with Blinatumomab (a CD19×CD3 bispecific antibody) in the presence of CD19 expressing B cells. In another exemplary embodiment, the TCR is directed to NY-ESO/MHC complex (e.g., SEQ ID NO: 2836) and the NY-ESO-TCR-expressing T cell is contacted with Blinatumomab (a CD19×CD3 bispecific antibody) in the presence of CD19 expressing B cells. In another exemplary embodiment, the TCR is directed to WT1 and the WT1-TCR-expressing T cell is contacted with Blinatumomab (a CD19×CD3 bispecific antibody) in the presence of CD19-expressing B cells. In another exemplary embodiment, the TCR is directed to MART1 and the MART1-TCR-expressing T cell is contacted with Blinatumomab (a CD19×CD3 bispecific antibody) in the presence of CD19-expressing B cells.

[0493] The Table 7E provides the SEQ ID (DNA) and SEQ ID (PRT) of several exemplary bispecific antibodies that bind to different antigens (e.g., CD19, CD20/MS4A1, CD22, BCMA etc.) through one of their antigen binding domains and bind to CD3, CD28 or 41BB through their other antigen binding domain. As an example, a bispecific antibody FMC63×CD3 is represented by SEQ ID NO (DNA): 2470 and SEQ ID NO (PRT): 2646. This bispecific antibody is designed to provide activation signal to T cells, including T cells expressing a CAR, e.g., a mesothelin-CAR, or to T cells expressing a native or a recombinant TCR, e.g., a NYESO-TCR or WT1-TCR, when the T cells are exposed to a CD19-expressing target cell (e.g., REC-1 or NALM6 cells) or to CD19-beads. It is to be noted that this bispecific antibody is designed to provide the activation signal even if CAR or TCR is not directed to CD19 and even if the T cells do not express any recombinant CAR or recombinant TCR.

[0494] The bispecific antibody FMC63×CD28 is represented by SEQ ID NO (DNA): 2526 and SEQ ID NO (PRT): 2702. This bispecific antibody is designed to provide co-stimulation to T cells, including T cells expressing a CAR, e.g., a mesothelin-CAR, or T cells expressing a native or a recombinant TCR, e.g., a NY-ESO1-TCR or WT1-TCR when the T cells are exposed to a CD19-expressing target cell (e.g., REC-1 or NALM6 cells) or to CD19-bead. It is to be noted that this bispecific antibody is designed to provide the co-stimulatory signal even if CAR or TCR is not directed to CD19 and even if the T cells do not express any recombinant CAR or recombinant TCR.

[0495] The bispecific antibody FMC63×41BB is represented by SEQ ID NO (DNA): 2582 and SEQ ID NO (PRT): 2758. This bispecific antibody is designed to provide co-stimulation to T cells, including T cells expressing a CAR, e.g., a mesothelin-CAR, or T cells expressing a native or a recombinant TCR, e.g., a NY-ESOI-TCR or WT1-TCR when the T cells are exposed to a CD19-expressing target cell (e.g., REC-1 or NALM6 cells) or to CD19-bead. It is to be noted that this bispecific antibody is designed to provide the co-stimulatory signal even ifCAR or TCR is not directed to CD19 and even ifthe T cells do not express any recombinant CAR or recombinant TCR.

| | | Ag × CD3 | | Ag × CD28 | | Ag × 41BB | |
|---|---|---|---|---|---|---|---|
| | | SEQ | SEQ | SEQ | SEQ | SEQ | SEQ |
| Antigen | Antigen Binding | ID NO | ID NO | ID NO | ID NO | ID NO | ID NO |
| (Ag) | Domain | (DNA) | (PRT) | (DNA) | (PRT) | (DNA) | (PRT) |
| CD19 | FMC63 | 2470 | 2646 | 2526 | 2702 | 2582 | 2758 |
| CD19 | huFMC63-11 | 2471 | 2647 | 2527 | 2703 | 2583 | 2759 |
| CD19 | huFMC63-11-N203Q | 2472 | 2648 | 2528 | 2704 | 2584 | 2760 |
| CD19 | CD19Bu12 | 2473 | 2649 | 2529 | 2705 | 2585 | 2761 |
| CD19 | CD19MM | 2474 | 2650 | 2530 | 2706 | 2586 | 2762 |
| CD19 | Ritx-CD19-MOR0028 | 2475 | 2651 | 2531 | 2707 | 2587 | 2763 |
| CD19 | CD19-hu-mROO5-1 | 2476 | 2652 | 2532 | 2708 | 2588 | 2764 |
| BCMA | BCMA-J6M0 | 2477 | 2653 | 2533 | 2709 | 2589 | 2765 |
| BCMA | BCMA-huC12A3-L3H3 | 2478 | 2654 | 2534 | 2710 | 2590 | 2766 |
| BCMA | BCMA-huC11.D5.3 | 2479 | 2655 | 2535 | 2711 | 2591 | 2767 |
| | L1H3 | | | | | | |
| BCMA | BCMA-huC13-F12 | 2480 | 2656 | 2536 | 2712 | 2592 | 2768 |
| CD20 | CD20-2F2 | 2481 | 2657 | 2537 | 2713 | 2593 | 2769 |
| CD20 | CD20-GA101 | 2482 | 2658 | 2538 | 2714 | 2594 | 2770 |
| CD20 | CD20-2H7 | 2483 | 2659 | 2539 | 2715 | 2595 | 2771 |
| CD20 | CD2O-Ubli-v4 | 2484 | 2660 | 2540 | 2716 | 2596 | 2772 |
| CD20 | CD20-2H7 | 2485 | 2661 | 2541 | 2717 | 2597 | 2773 |
| CD20 | CD20-7D8 | 2486 | 2662 | 2542 | 2718 | 2598 | 2774 |
| CD22 | CD22-h10F4v2 | 2487 | 2663 | 2543 | 2719 | 2599 | 2775 |
| CD22 | CD22-H22Rhov2A | 2488 | 2664 | 2544 | 2720 | 2600 | 2776 |
| CD22 | CD22-m971-HL | 2489 | 2665 | 2545 | 2721 | 2601 | 2777 |
| CD22 | CD22-5-HL | 2490 | 2666 | 2546 | 2722 | 2602 | 2778 |
| CD22 | CD22-10-HL | 2491 | 2667 | 2547 | 2723 | 2603 | 2779 |
| CD22 | CD22-HA22 | 2492 | 2668 | 2548 | 2724 | 2604 | 2780 |
| CD30 | CD30-5F11 | 2493 | 2669 | 2549 | 2725 | 2605 | 2781 |
| CD30 | CD30-Ac10 | 2494 | 2670 | 2550 | 2726 | 2606 | 2782 |
| CD32 | CD32-Med9 | 2495 | 2671 | 2551 | 2727 | 2607 | 2783 |
| CD33 | CD33-AFS | 2496 | 2672 | 2552 | 2728 | 2608 | 2784 |
| CD33 | CD33-huMyc9 | 2497 | 2673 | 2553 | 2729 | 2609 | 2785 |
| CD33 | CD33-Him3-4 | 2498 | 2674 | 2554 | 2730 | 2610 | 2786 |
| CD33 | CD33-SGNh2H12 | 2499 | 2675 | 2555 | 2731 | 2611 | 2787 |
| CD33 | CD33-15G15-33 | 2500 | 2676 | 2556 | 2732 | 2612 | 2788 |
| CD33 | CD33-33H4 | 2501 | 2677 | 2557 | 2733 | 2613 | 2789 |
| CD123 | CD123-CSL362 | 2502 | 2678 | 2558 | 2734 | 2614 | 2790 |
| CD123 | CD123-1172 | 2503 | 2679 | 2559 | 2735 | 2615 | 2791 |
| CD123 | CD123-DART-1 | 2504 | 2680 | 2560 | 2736 | 2616 | 2792 |
| CD123 | CD123-DART-2 | 2505 | 2681 | 2561 | 2737 | 2617 | 2793 |
| CD123 | CD123-9D7 | 2506 | 2682 | 2562 | 2738 | 2618 | 2794 |
| CD123 | CD123-3B10 | 2507 | 2683 | 2563 | 2739 | 2619 | 2795 |
| CD138 | CD138 | 2508 | 2684 | 2564 | 2740 | 2620 | 2796 |
| CS1 | CS1-HuLuc64 | 2509 | 2685 | 2565 | 2741 | 2621 | 2797 |
| CS1 | CS1-huLuc90 | 2510 | 2686 | 2566 | 2742 | 2622 | 2798 |
| FLT3 | FLT3-NC7 | 2511 | 2687 | 2567 | 2743 | 2623 | 2799 |
| MPL | MPL-175 | 2512 | 2688 | 2568 | 2744 | 2624 | 2800 |
| MPL | MPL-161 | 2513 | 2689 | 2569 | 2745 | 2625 | 2801 |
| MPL | MPL-111 | 2514 | 2690 | 2570 | 2746 | 2626 | 2802 |
| MPL | Hu-161-2 | 2515 | 2691 | 2571 | 2747 | 2627 | 2803 |
| MPL | MPL-hu-175-2 | 2516 | 2692 | 2572 | 2748 | 2628 | 2804 |
| MPL | MPL-hu-111-2 | 2517 | 2693 | 2573 | 2749 | 2629 | 2805 |
| Lym1 | Lym1 | 2518 | 2694 | 2574 | 2750 | 2630 | 2806 |
| Lym2 | Lym2 | 2519 | 2695 | 2575 | 2751 | 2631 | 2807 |
| CD70 | CD70-h1F6 | 2520 | 2696 | 2576 | 2752 | 2632 | 2808 |
| CD79b | CD79b-2F2 | 2521 | 2697 | 2577 | 2753 | 2633 | 2809 |
| CD179b | CD179b | 2522 | 2698 | 2578 | 2754 | 2634 | 2810 |
| GPRC5D | GPRC5D-ET150-5 | 2523 | 2699 | 2579 | 2755 | 2635 | 2811 |
| GPRC5D | GPRC5D-ET150-18 | 2524 | 2700 | 2580 | 2756 | 2636 | 2812 |
| FR1 | FR1-huMov19 | 2525 | 2701 | 2581 | 2757 | 2637 | 2813 |
| EGFR | Cetuxi | 2638 | 2814 | 2639 | 2815 | 2640 | 2816 |
| FITC | FITC-4M-53 | 2641 | 2817 | 2642 | 2818 | 2643 | 2819 |
| Streptag | Streptag | 2644 | 2820 | 2645 | 2821 | 2851 | 2852 |

[0496] The activation/expansion of the T cells using bispecific/multispecific engagers can be further improved by altering the binding affinity of the bispecific/multispecific engagers to their cognate antigens using methods known in the art.

[0497] In one embodiment, the population of cells (e.g., immune effector cells, e.g., T cells) are autologous to the subject to whom the cells will be administered for treatment. In one embodiment, the population of immune effector cells are allogeneic to the subject to whom the cells will be administered to for treatment.

[0498] In one embodiment, the population of immune effector cells are T cells isolated from peripheral blood lymphocytes. In one embodiment, the population of immune effector cells are obtained from a subject who has received an agent to mobilize the immune cells from tissues. In one embodiment, the population of immune effector cells are obtained from a subject who has been administered a CXCR4 antagonist, a cytokine (e.g., G-CSF, GM-CSF, etc.) a beta2 adrenergic agonist, dasatinib or has been made to exercise. In an embodiment, the population of T cells are obtained by lysing the red blood cells and/or by depleting the monocytes. In an embodiment, the population of T cells is isolated from peripheral lymphocytes using, e.g., a method described herein. In one embodiment, the T cells comprise CD4+ T cells. In another embodiment, the T cells comprise CD8+ T cells. In another embodiment, the T cells comprise Pgp+ T cells. In a further embodiment, the T cells comprise T stem memory cells. In another embodiment, the T cells comprise tissue-resident or tumor-infilterating T cells. In a further embodiment, the T cells comprise naive T-cells. In one embodiment, the immune cells, e.g, immune effector cells, comprise hematopoietic stem cells (e.g., cord blood cells) that can give rise to immune cells. In one embodiment, the immune cells, e.g., immune effector cells, are derived from induced pluripotent stem cells (e.g., iPSC) that can give rise to immune cells. In another embodiment, the immune effector cells comprise stem T cells. In another embodiment, the immune effector cells comprise NKT cells. In one embodiment, the population of immune cells, e.g, immune effector cells, can be obtained from a blood sample from a subject, e.g., obtained by apheresis.

[0499] In one embodiment, the method comprises obtaining a population of immune effector T cells from the tumor tissue of a subject (i.e. Tumor infiltrating lymphocytes).

[0500] In one embodiment, the method further comprises generating a population of engineered immune cells expressing exogenous RNA or DNA from the population of immune cells.

[0501] In one embodiment, the immune cells are expanded and/or activated by culturing the immune cells in the presence of bispecific/multispecific engager and an immobilized ligand, e.g., a cognate antigen molecule or an anti-idiotype antibody. In one embodiment, the immune effector cells are contacted with the T cell bispecific antibody and cognate ligand (e.g., antigen molecule or anti-idiotype antibody) at least, 2, 3, 4, 5, 6, 7, 8, 9, 10, 11, 12, 13, 14, 15, 16, 17, 18, 19, 20, 21, 22, 23, 24, 28, 32, 36, 36, or 48 hours after the nucleic acid (RNA or DNA) encoding the CAR or the TCR is introduced into the immune cells. In one embodiment, the immune cells are contacted with the bispecific/multispecific engager and its immobilized cognate ligand (e.g. antigen molecule or an i anti-idiotype antibody) less than 24, 15, 12, 10, or 8 hours after nucleic acid (RNA or DNA) encoding the CAR or the TCR is introduced into the immune cells, e.g, immune effector cells.

[0502] In one embodiment, the immune cells are expanded and/or activated by culturing the immune cells (e.g., CAR-T cells) in the presence of bispecific/multispecific engager, e.g., a bispecific antibody, and an immobilized ligand, (e.g., a cognate antigen molecule or an anti-idiotype antibody) and an antibody against a co-stimulatory receptor expressed on the immune T cells. Exemplary co-stimulatory receptors include CD28, 41BB and CD27. In one embodiment, the 41BB antibody is Utomilumab.

[0503] In one embodiment, the ligand is a molecule that activates the T cell upon binding to the bispecific/multispecifc engager, e.g, a bispecific antibody. In one embodiment, the bispecific antibody is Blinatumomab and the immobilized cognate ligand is a CD19-expressing B cell. In one embodiment, the bispecific antibody is Blinatumomab and the immobilized cognate ligand is a bead coated with CD19 extracellular domain or a fragment thereof. In one embodiment, the cognate ligand is a recombinant antigen recognized by the second antigen binding portion of the bispecific antibody. In one embodiment, the ligand is an anti-idiotype antibody or antibody fragment or non-immunoglobulin antigen binding scaffold (e.g., it is an antibody molecule that binds to the second antigen binding domain of the bispecific antibody) e.g., an anti-CD19 idiotype antibody.

[0504] In one embodiment, the ligand is attached to a substrate. In one embodiment, the substrate is a solid support. In one embodiment, the substrate is selected from microtiter plates (e.g., ELISA plates); membranes (e.g., nitrocellulose membranes, PVDF membranes, nylon membranes, acetate derivatives, and combinations thereof); fiber matrix, Sepharose matrix, sugar matrix; plastic chips; glass chips; or any type of bead (e.g., Luminex beads, Dynabeads, magnetic beads, flow-cytometry beads, and combinations thereof). In one embodiment, the substrate is an ELISA plate. In another embodiment, the substrate is a bead, e.g., Dynabeads.

[0505] In one embodiment, the immune effector cells (e.g., CAR-T or TCR-T cells) are contacted with the ligand, e.g., antigen-coated beads at a ratio of 1:100, 1:50, 1:40, 1:30, 1:20, 1:10, 1:9, 1:8, 1:7, 1:6, 1:5, 1:4, 1:3, 1:2, 1:1, 2:1, 3:1, 4:1, 5:1, 6:1, 7:1, 8:1, 9:1, 10:1, or 15:1 beads per immune effector cell. In one embodiment, the immune effector cells are contacted with antigen coated beads at a ratio of 3:1 beads per immune effector cell.

[0506] In one embodiment, the immune effector cells (e.g., CAR-T or TCR-T) are further expanded in an appropriate media (e.g., media described herein) that may, optionally, contain one or more factors for proliferation and/or viability, including serum (e.g., fetal bovine or human serum), interleukin-2 (IL-2), insulin, IFN-γ, IL-4, IL-7, GM-CSF, IL-10, IL-12, IL-15, IL-21, TGF, and TNF-α or any other additives for the growth of cells. In one embodiment, the cells are expanded in the presence of IL-15 and/or IL-7 (e.g., IL-15 and IL-7). In one embodiment, the cells are expanded in the presence of one or more inhibitors of BRD9, EZH2, MLL2, MLL3, MLL4, methylcytosine dioxygenase genes (e.g., Tet1, Tet2, Tet3), ATM, CHEK, FBXW10, BCOR, FAT1, ASXL1, PHF6, SF3B1, YY1, CBFb, Runx1, EHMT2 (G9A), SMARCA4, CREBBP, PRDM1/BLIMP1, HDAC2, TRAIL (TNFSF10) and/or Death Receptor 5 (DR5 or TNFRSF10B). In one embodiment, the cells are expanded in the presence of AKT inhibitor. In one embodiment, the immune cells are expanded in the presence of IL-2. In one embodiment, the immune cells are expanded in the presence of CD28 antibody coated beads. In one embodiment, the immune cells are expanded in the presence of 41BB antibody coated beads. In one embodiment, the immune cells are expanded in the presence of CD28 antibody. In one embodiment, the immune cells are expanded in the presence of 41BB antibody. In one embodiment, the 41BB antibody is Utomilumab.

[0507] In one embodiment, immune effector cells transduced with a nucleic acid encoding a CAR or TCR, e.g., a CAR or TCR described herein, e.g., a CD19 CAR or a NY-ESO-1 TCR described herein, are expanded in culture in the presence of bispecific/multispecific engager, e.g., a bispecific antibody, and its cognate ligand for a period of several hours (e.g., about 2, 3, 4, 5, 6, 7, 8, 9, 10, 15, 18, 21 hours) to about 40 days (e.g., 1, 2, 3, 4, 5, 6, 7, 8, 9, 10, 11, 12, 13, 14, 15, 16, 17, 18, 19, 20, 21, 22, 23, 24, 25, 26, 27, 28, 29, 30, 31, 32, 33, 34, 35, 36, 37, 38, 39 or 40 days). In one embodiment, the cells are expanded for a period of 4 to 9 days. In one embodiment, the cells are expanded for a period of 8 days or less, e.g., 7, 6,5, 4, or 3 days.

[0508] Potency of the immune cells, e.g. immune effector cells, e.g., CAR-T or TCR-T cells, can be defined, e.g., by various T cell functions, e.g. proliferation, target cell killing, cytokine production, activation, migration, or combinations thereof. In one embodiment, the immune cells, e.g., a CD19 CAR cell described herein, expanded in the presence of the bispecific/multispecific engager, e.g., T cell bispecific antibody, and cognate ligand for 5 days show at least one, two, three or four-fold increase in cells doublings upon antigen stimulation as compared to the same cells expanded in culture without the bispecific/multispecific engager, e.g., T cell bispecific antibody, and cognate ligand. In one embodiment, the immune effector cells, e.g., the cells expressing a CD19 CAR described herein, are expanded in culture for 5 days in the presence of the bispecific/multispecific engager, e.g., T cell bispecific antibody, and cognate ligand, and the resulting cells exhibit higher proinflammatory cytokine production, e.g., IFN-γ and/or GM-CSF levels, as compared to the same cells expanded in culture without bispecific/multispecific engager, e.g., T cell bispecific antibody, and cognate ligand under the same culture conditions. In one embodiment, the immune effector cells, e.g., a CD19 CAR cell described herein, expanded for 5 days in the presence of the bispecific/multispecific engager, e.g., T cell bispecific antibody, and cognate ligand show at least a one, two, three, four, five, ten fold or more increase in pg/ml of proinflammatory cytokine production, e.g., IFN-γ and/or GM-CSF levels, as compared to the same cells expanded in culture without the bispecific/multispecific engager and cognate ligand under the same culture conditions.

[0509] In one embodiment, the immune cells, e.g., immune effector cells expressing a CAR, are expanded at least a 200-fold (e.g., 200-fold, 250-fold, 300-fold, 350-fold, 400-fold, 450-fold, 500-fold, 550-fold, or 650-fold) as measured by a method described herein such as flow cytometry. In one embodiment, the cells are expanded about 500 fold.

[0510] In one embodiment, the cell expansion is measured at about 5, 10, 15, 20, 25, 30, 35, 40, 45, or 50 days after stimulation with the bispecific/multispecific engager, e.g., bispecific antibody, and its cognate ligand, e.g., the cognate antigen molecule. In one embodiment, the cell expansion is measured between 10 and 25 days after stimulation with the ligand, e.g., the cognate antigen molecule. In one embodiment, the expansion is measured 8, 9, 10, 11, 12, 13, 14, 15, 16, 17, 18, 19, 20, 21, 22, 23, 24, or 25 days after stimulation with the ligand, e.g., the cognate antigen molecule.

[0511] In one embodiment, the immune cells, e.g., immune effector cells, are cryopreserved after the appropriate expansion period. In one embodiment, the cells are cryopreserved according to a method described herein. In one embodiment, the expanded cells are cryopreserved in an appropriate media, e.g., an infusible media, e.g., as described herein.

[0512] In another aspect, the disclosure features a reaction mixture comprising a population of immune effector cells wherein a plurality of the cells of the population in the reaction mixture comprise a nucleic acid molecule that comprises a CAR/TCR encoding sequence, e.g., a CD19 CAR encoding sequence or aNYESO-1 TCR encoding sequence, e.g., as described herein.

[0513] In one embodiment, at least at least 20%, 50%, 80%, 85%, 86%, 87%, 88%, 89%, 90%, 91%, 92%, 93%, 94%, 95%, 96%, 97%, 98%, 99% or 100% of the immune effector cells express the CAR/TCR mRNA.

[0514] In another embodiment, at least at least at least 80%, 85%, 86%, 87%, 88%, 89%, 90%, 91%, 92%, 93%, 94%, 95%, 96%, 97%, 98%, 99% or 100% of the immune cells, e.g., immune effector cells, express the CAR/TCR on their cell surface.

[0515] In one embodiment, the reaction mixture can further comprise a bispecific/multispecific engager, e.g., bispecific antibody, and its cognate ligand as described herein (e.g., a cognate antigen molecule or an anti-idiotype antibody). In one embodiment, the ligand is an antigen (e.g., CD19) that is expressed on the surface of a cell and is bound by one of the antigen binding domains of the T cell bispecific antibody (e.g., Blinatumomab). In another embodiment the ligand is an anti-idiotype antibody, e.g., an anti-CD19 idiotype antibody.

[0516] In one embodiment, the immune effector cells, e.g., CAR/TCR-expressing T cells, and the ligand (e.g., antigen) coated beads are present in a ratio of 1:100, 1:50, 1:40, 1:30, 1:20, 1:10, 1:9, 1:8, 1:7, 1:6, 1:5, 1:4, 1:3, 1:2, 1:1, 2:1, 3:1, 4:1, 5:1, 6:1, 7:1, 8:1, 9:1, 10:1, or 15:1 beads per immune effector cell. In one embodiment, the immune effector cells and the ligand (e.g., antigen) coated beads are present in a ratio of 3:1 beads per immune effector cell. The reaction mixture further comprises the T cell bispecific antibody. In one embodiment, the reaction mixture further comprises a co-stimulatory molecule, such as a 41BB agonist (e.g., 41BBL or Utomilumab).

[0517] In one embodiment, the reaction mixture further comprises a cryoprotectant or stabilizer such as, e.g., a saccharide, an oligosaccharide, a polysaccharide and a polyol (e.g., trehalose, mannitol, sorbitol, lactose, sucrose, glucose and dextran), salts and crown ethers. In one embodiment, the cryoprotectant is dextran.

[0518] In accordance with the methods, preparations, and reaction mixtures described herein, an immune effector cell, e.g., obtained by a method described herein and activated/expanded by bispecific antibodies described herein, can be engineered to contain a CAR, a next generation CAR (e.g., SIR, zSIR, TFP, Ab-TCR) and/or a recombinant TCR molecule that targets one or more cancer associated antigens. In some embodiments, the tumor antigen is a tumor antigen described in International Applications WO2015/142675, filed Mar. 13, 2015, which is herein incorporated by reference in its entirety. In some embodiments, CAR, a recombinant TCR, a TCR receptor fusion proteins or TFP, Antibody TCR or AbTCRs, and synthetic immune receptors or SIR are as described in PCT/US2017/024843, WO 2014/160030 A2, WO 2016/187349 A1, PCT/US2016/058305 and PCT/US17/64379, which are herein incorporated by reference in their entirety.

[0519] In another aspect the disclosure features a method of treating, or providing anti-tumor immunity to, a subject having a cancer. The method includes administering to the subject an effective amount of an immune effector cell population, wherein the immune effector cell population is, or was previously, expanded by contacting the immune effector cell population, with a bispecific/multispecific engager, e.g., bispecific antibody, wherein the bispecific antibody targets a cognate antigen molecule expressed preferentially on hematopoietic cells; and expanding/activating the population of immune effector cells in the presence of a ligand, e.g., the cognate antigen molecule or an anti-idiotypic antibody molecule. In one embodiment, the nucleic acid is RNA, e.g., in vitro transcribed RNA. In another embodiment, the cognate antigen molecule is an antigen expressed on hematopoietic cells. In one embodiment, the cognate antigen molecule or the anti-idiotypic antibody molecule is attached to a substrate, e.g., a bead. In some embodiments, the method further includes administering to the subject an immune cell population comprising a CAR or a recombinant TCR (e.g., a vector comprising a nucleic acid encoding a CAR or a recombinant TCR or rTCR), wherein the immune effector cell population is, or was previously, expanded as described herein. In one embodiment, the vector is selected from the group consisting of a DNA, a RNA, a plasmid, a lentivirus vector, adenoviral vector, or a retrovirus vector.

[0520] In one embodiment, the population of immune effector cells is transduced with a vector once, e.g., within one day after population of immune effector cells are obtained from a blood sample from a subject, e.g., obtained by apheresis.

[0521] In one embodiment, the bispecific antibody targets a cognate antigen molecule (e.g., CD19) and the CAR/recombinant TCR targets a different antigen molecule (e.g., Mesothelin or NY-ESO-1). In one embodiment, the bispecific antibody targets a cognate antigen molecule (e.g., CD19) and the CAR/rTCR targets the same cognate antigen molecule.

[0522] In one embodiment, the bispecific antibody targets an antigen expressed on hematopoietic cells described herein, e.g., CD19, and the CAR/rTCR targets a cancer associated antigen described herein, e.g., Mesothelin or NY-ESO-1.

[0523] In one embodiment, the bispecific antibody targets an antigen expressed on B cells (e.g., CD19, CD20/MS4A1 or CD22) and CAR/rTCR targets an antigen (e.g., Mesothelin, Her2, Her3, TSHR, LHR, EGFRviii, EGFR, Folate Receptor alpha, ROR1, NY-ESO-1, AFP etc.) expressed on solid tumors (e.g., Breast, prostate, brain, lung, gastrointestinal, kidney, thyroid, pancreatic, hepatic, skin, ovarian, cervical, endometrial, endocrine and soft tissue cancers).

[0524] In one embodiment, the bispecific antibody targets an antigen (e.g., BCMA, CD138, SLAMF7 etc.) expressed on plasma cells and CAR/rTCR targets an antigen (e.g., Mesothelin, Her2, Her3, TSHR, LHR, EGFRviii, EGFR, Folate Receptor alpha, ROR1 etc.) expressed on solid tumors (e.g., Breast, prostate, brain, lung, gastrointestinal, kidney, thyroid, pancreatic, hepatic, skin, ovarian, cervical, endometrial, endocrine and soft tissue cancers).

[0525] In one embodiment, the bispecific antibody targets an antigen (e.g., CD33, CD123, MPL etc.) expressed on myeloid cells and CAR/rTCR targets an antigen (e.g., Mesothelin, Her2, Her3, TSHR, LHR, EGFRviii, EGFR, Folate Receptor alpha, ROR1, NY-ESO-1, AFP etc.) expressed on solid tumors (e.g., Breast, prostate, brain, lung, gastrointestinal, kidney, thyroid, pancreatic, hepatic, skin, ovarian, cervical, endometrial, endocrine and soft tissue cancers).

[0526] In one embodiment, the bispecific antibody targets CD19, CD20/MS4A1, CD22, CD23, BCMA, CS1/SLAMF7, CD30, CD32b, CD70, CD79b, CD123, CD33, CD138, CD179b, GPRC5D, Lyml, Lym2, and/or FCRH5 and CAR/rTCR targets Mesothelin, epidermal growth factor receptor variant III (EGFRviii); ganglioside G2 (GD2); ganglioside GD3 (aNeu5Ac(2-8)aNeu5Ac(2-3)bDGalp(1-4)bDGlcp(1-1)Cer); Tn antigen ((Tn Ag) or (GalNAcα-Ser/Thr)); prostate-specific membrane antigen (PSMA); Receptor tyrosine kinase-like orphan receptor 1 (ROR1); Carcinoembryonic antigen (CEA); Epithelial cell adhesion molecule (EPCAM); B7H3 (CD276); KIT (CD117); Interleukin-13 receptor subunit alpha-2 (IL-13Ra2 or CD213A2); Interleukin 11 receptor alpha (IL-11Ra); prostate stem cell antigen (PSCA); vascular endothelial growth factor receptor 2 (VEGFR2); Lewis(Y) antigen; Stage-specific embryonic antigen-4 (SSEA-4); Folate receptor alpha (FRa or FR1); Folate receptor beta (FRb); Receptor tyrosine-protein kinase ERBB2 (Her2/neu); Mucin 1, cell surface associated (MUC1); epidermal growth factor receptor (EGFR); neural cell adhesion molecule (NCAM); Prostase; prostatic acid phosphatase (PAP); elongation factor 2 mutated (ELF2M); Ephrin B2; fibroblast activation protein alpha (FAP); insulin-like growth factor 1 receptor (IGF-I receptor), carbonic anhydrase IX (CA1X); tyrosinase; ephrin type-A receptor 2 (EphA2); sialyl Lewis adhesion molecule (sLe); ganglioside GM3 (aNeu5Ac(2-3)bDClalp(1-4)bDGlcp(1-1)Cer); transglutaminase 5 (TGS5); high molecular weight-melanoma associated antigen (HMWMAA); o-acetyl-GD2 ganglioside (OAcGD2); tumor endothelial marker 1 (TEM1/CD248); tumor endothelial marker 7-related (TEM7R); claudin 6 (CLDN6); thyroid stimulating hormone receptor (TSHR); G protein coupled receptor class C group 5, member D (GPRC5D); chromosome X open reading frame 61 (CXORF61); CD97; CD179a; anaplastic lymphoma kinase (ALK); Polysialic acid; placenta-specific 1 (PLAC1); hexasaccharide portion of globoH glycoceramide (GloboH); mammary gland differentiation antigen (NY-BR-1); uroplakin 2 (UPK2); Hepatitis A virus cellular receptor 1 (HAVCR1); adrenoceptor beta 3 (ADRB3); pannexin 3 (PANX3); G protein-coupled receptor 20 (GPR20); lymphocyte antigen 6 complex, locus K 9 (LY6K); Olfactory receptor 51E2 (OR5IE2); TCR Gamma Alternate Reading Frame Protein (TARP); Wilms tumor protein (WT1); Cancer/testis antigen 1 (NY-ESO-1); Cancer/testis antigen 2 (LAGE-1a); Melanoma-associated antigen 1 (MAGE-A1); CD19; CD20/MS4A1; CD123; CD22; CD23, CD30; CD33; CD171; CS-1 (also referred to as CD2 subset 1, CRACC, SLAMF7, TNF receptor family member B cell maturation (BCMA); CD319, and 19A24); C-type lectin-like molecule-1 (CLL-1 or CLECL1); Fins Like Tyrosine Kinase 3 (FLT3); Tumor-associated glycoprotein 72 (TAG72); CD38; CD44v6; a glycosylated CD43 epitope expersed on acute leukemia or lymphoma but not on hematopoietic progenitors, a glycosylated CD43 epitope expressed on non-hematopoietic cancers, Protease Serine 21 (Testisin or PRSS21); CD24; Platelet-derived growth factor receptor beta (PDGFR-beta); Proteasome (Prosome, Macropain) Subunit, Beta Type, 9 (LMP2); glycoprotein 100 (gp100); oncogene fusion protein consisting of breakpoint cluster region (BCR) and Abelson murine leukemia viral oncogene homolog 1 (Abl) (bcr-abl); ETS translocation-variant gene 6, located on chromosome 12p (ETV6-AML); sperm protein 17 (SPA17); X Antigen Family, Member 1A (XAGE1); angiopoietin-binding cell surface receptor 2 (Tie 2); melanoma cancer testis antigen-1 (MAD-CT-1); melanoma cancer testis antigen-2 (MAD-CT-2); Fos-related antigen 1; tumor protein p53 (p53); p53 mutant; prostein; surviving; telomerase; prostate carcinoma tumor antigen-1 (PCT A-1 or Galectin 8), melanoma antigen recognized by T cells 1 (MelanA or MARTI); Rat sarcoma (Ras) mutant; human Telomerase reverse transcriptase (hTERT); sarcoma translocation breakpoints; melanoma inhibitor of apoptosis (ML-IAP); ERG (transmembrane protease, serine 2 (TMPRSS2) ETS fusion gene); N-Acetyl glucosaminyl-transferase V (NA17); paired box protein Pax-3 (PAX3); Androgen receptor; Cyclin B1; v-myc avian myelocytomatosis viral oncogene neuroblastoma derived homolog (MYCN); Ras Homolog Family Member C (RhoC); Tyrosinase-related protein 2 (TRP-2); Cytochrome P450 1B 1 (CYPlB 1); CCCTC-Binding Factor (Zinc Finger Protein)-Like (BORIS or Brother of the Regulator ofimprinted Sites), Squamous Cell Carcinoma Antigen Recognized By T Cells 3 (SART3); Paired box protein Pax-5 (PAX5); proacrosin binding protein sp32 (OY-TES1); lymphocyte-specific protein tyrosine kinase (LCK); A kinase anchor protein 4 (AKAP-4); synovial sarcoma, X breakpoint 2 (SSX2); Receptor for Advanced Glycation Endproducts (RAGE-1); renal ubiquitous 1 (RU1); renal ubiquitous 2 (RU2); legumain; human papilloma virus E6 (HPV E6); human papilloma virus E7 (HPV E7); intestinal carboxyl esterase; heat shock protein 70-2 mutated (mut hsp70-2); CD79a; CD79b; CD72; Leukocyte-associated immunoglobulin-like receptor 1 (LAIR1); Fc fragment of IgA receptor (FCAR or CD89); Leukocyte immunoglobulin-like receptor subfamily A member 2 (LILRA2); CD300 molecule-like family member f (CD300LF); C-type lectin domain family 12 member A (CLEC12A); bone marrow stromal cell antigen 2 (BST2); EGF-like module-containing mucin-like hormone receptor-like 2 (EMR2); lymphocyte antigen 75 (LY75); Glypican-3 (GPC3); Fc receptor-like 5 (FCRL5); and immunoglobulin lambda-like polypeptide 1 (IGLL1), MPL, Biotin, c-MYC epitope Tag, CD34, LAMP1 TROP2, GFRalpha4, CDH17, CDH6, NYBRI, CDH19, CD200R, Slea (CA19.9; Sialyl Lewis Antigen); Fucosyl-GM1, PTK7, gpNMB, CDH1-CD324, DLL3, CD276/B7H3, IL11Ra, IL13Ra2, CD179b-IGL11, TCRgamma-delta, NKG2D, CD32 (FCGR2A), Tn ag, Tim1-/HVCR1, CSF2RA (GM-CSFR-alpha), TGFbetaR2, Lews Ag, TCR-beta1 chain, TCR-beta2 chain, TCR-gamma chain, TCR-delta chain, FITC, Leutenizing hormone receptor (LHR), Follicle stimulating hormone receptor (FSHR), Chorionic Gonadotropin Hormone receptor (CGHR), CCR4, GD3, SLAMF6, SLAMF4, HIV1 envelope glycoprotein, HTLV1-Tax, CMV pp65, EBV-EBNA3c, KSHV K8.1, KSHV-gH, influenza A hemagglutinin (HA), GAD, PDL1, GUANYLYL CYCLASE C (GCC), autoantibody to desmoglein 3 (Dsg3), MPL, autoantibody to desmoglein 1 (Dsg1), HLA, HLA-A, HLA-A2, HLA-B, HLA-C, HLA-DP, HLA-DM, HLA-DOA, HLA-DOB, HLA-DQ, HLA-DR, HLA-G, IGE, CD99, RAS G12V, TISSUE FAACTOR 1 (TF1), AFP, GPRC5D, CLAUDIN18.2 (CLD18A2 OR CLDN18A.2)), P-GLYCOPROTEIN, STEAP1, LIV1, NECTIN-4, CRIPTO, GPA33, BST1/CD157, LOW CONDUCTANCE CHLORIDE CHANNEL, VISTA, CD16ORF54, Muc5Ac, EMR2, Robo4, RNF43, CLDN6, MMP16, UPK1B, BMPR1B, Ly6E, STEAPI, WISP1, SLC34A2 and antigen recognized by TNT antibody.

[0527] In accordance with methods of treating a disorder as described herein (e.g., a cancer) and providing anti-tumor immunity described herein, in some embodiments, the method comprises administering to a subject a population of immune cells (e.g., CAR-T cells) made by a method described herein along with a T cell bispecific antibody. In some embodiment the population of immune cells is engineered to express a CAR or a rTCR molecule, e.g. a CAR or a rTCR described herein, e.g., a CD19 CAR or a NY-ESO-1 rTCR described herein.

[0528] Also provided herein is a composition comprising an immune cell (e.g., CAR-T cells) and a bispecific/multispecific engager, e.g., a bispecific antibody, as described herein for use in the treatment of a subject having a disease associated with expression of a tumor antigen, e.g., a disorder as described herein.

[0529] In one embodiment, the cancer is a hematological cancer such as, e.g., ALL or CLL. In embodiments, the disease associated with expression of the tumor antigen is selected from the group consisting of a proliferative disease, a precancerous condition, a cancer, and a non-cancer related indication associated with expression of the tumor antigen.

[0530] In a preferred embodiment, the disease associated with a tumor antigen described herein is a solid tumor.

[0531] In preferred embodiments of any of the aforesaid methods or uses, the tumor antigen associated with the disease is chosen from one or more of: Mesothelin, EGFR viii, CHD6, CDH17, CDH19, DLL3, CLD18A2, ALK, CD276, CD324, B7H4, EGFR, EBNA3c, EpCaml, LICAM, Folate Receptor 1, GFRa4, STEAPI, Livl, Nectin4, Cripto, gpA33, ILIRAP, GD2, GD3, gp100, ROR1, SLea, PTK7, Prolactin Receptor, LHR, TSHR, Lewis Y, Her2, GCC, SSEA4, IL-13Ra2, PSMA, PSCA, NY-ESO1, WT1, MART1, MAGE1, AFP, TIM1, TROP2, hTERT, MMP16, UPK1B, BMPR1B, Ly6E, STEAPI, WISP1, SLC34A2, VEGFR3, Tn-Mucd, and Tyrosinase.

[0532] In one embodiment, the population of cells are autologous to the subject administered the population. In one embodiment, the population of cells is allogeneic to the subject administered the population. In one embodiment, the subject is a human.

[0533] In one embodiment, the subject is administered 10⁴ to 10⁶ immune cells, e.g., immune effector cells, per kg body weight of the subject. In one embodiment, the subject receives an initial administration of a population of immune effector cells (e.g., an initial administration of 10⁴ to 10⁶ immune effector cells per kg body weight of the subject, e.g., 10⁴ or 10⁵ immune effector cells per kg body weight of the subject), and one or more subsequent administrations of a population of immune effector cells (e.g., one or more subsequent administration of 10⁴ to 10⁶ immune effector cells per kg body weight of the subject, e.g., 10⁴ to 10⁶ immune effector cells per kg body weight of the subject). In one embodiment, the one or more subsequent administrations are administered less than 15 days, e.g., 14, 13, 12, 11, 10, 9, 8, 7, 6, 5, 4, 3, or 2 days after the previous administration, e.g., less than 4, 3, 2 days after the previous administration. In one embodiment, the subject receives a total of about 10⁶ immune effector cells per kg body weight of the subject over the course of at least three administrations of a population of immune effector cells, e.g., the subject receives an initial dose of 1×10⁵ immune effector cells, a second administration of 3×10⁵ immune effector cells, and a third administration of 6×10⁵ immune effector cells, and, e.g., each administration is administered less than 4, 3, 2 days after the previous administration.

[0534] In some embodiments, the subject is administered immune effector cells that have been engineered to express a recombinant receptor, such as a chimeric antigen receptor (CAR), a next generation CAR (e.g., a SIR, a zSIR, a TFP, an Ab-TCR, a cTCR) or a recombinant TCR. In some embodiments, the subject is administered immune effector cells where more than 10%, 20%, 50%, 75%, 80%, 90%, 95%, 99% of cells express a recombinant receptor.

[0535] In some embodiments, the subject is administered immune effector cells that have been isolated from a tumor (e.g. tumor infiltrating lymphocytes).

[0536] In some embodiments, the subject is administered immune effector T cells that have been activated by cytokines or chemokines to attack a tumor (e.g., cytokine activated killer cells).

[0537] In some embodiment, the subject is administrated a cell therapy product (e.g., CAR-T) and a bispecific/multispecific engager, e.g., a bispecific antibody, e.g., a bispecific antibody described herein, for a predetermined period (e.g., about 1, 2, 3, 4, 5, 6, 7, 8, 9, 10, 15, 18, 21, 22, 23 or 24 hours) or (e.g., 1, 5, 10, 15, 20, 25, 30, 35, 40, 45, 50, 60, 70, 90, 100, 120 days). In one embodiment, the subject receives a bispecific/multispecific engager, e.g., a bispecific antibody (e.g., a bispecific antibody described herein) for period of 2 to 20 days. In one embodiment, the subject receives a bispecific/multispecific engager, e.g., a bispecific antibody (e.g., a bispecific antibody described herein) for a period of 28 days or less, e.g., 20, 10, 7, 6 or 5 days. In one embodiment, bispecific/multispecific engager, e.g., a bispecific antibody, is administered in multiple cycles of 1-28 days followed by a rest period of 1-14 days.

[0538] In an exemplary embodiment, the subject is administered the bispecific antibody Blinatumomb (BLINCYTO) after the administration of immune effector T cells (e.g., CAR-T cells) and Blinatumomab is administered to the subject as a continuous intravenous infusion at a constant flow rate using an infusion pump which is programmable, lockable, non-elastomeric, and has an alarm as described in its prescribing information. In an exemplary embodiment, Blinatumomab is administered at a dose of 1 mcg/day, 2 mcg/day, 5 mcg/day, 10 mcg/day, 20 mcg/day, 25 mcg/day, 28 mcg/day, 30 mcg/day or 50 mcg/day by continuous infusion. In the preferred embodiment, Blinatumomab is administered after premedication with prednisone 100 mg intravenously or equivalent (e.g., dexamethasone 16 mg) 1 hour prior to the first dose of Blinatumomab in each cycle.

[0539] In an embodiment, the subject is administered cell therapy product (e.g., CAR-T) and a bispecific/multispecific engager, e.g., a bispecific antibody, as described herein (e.g., Blinatumomab) along with a costimulatory molecule as described herein, e.g., a 41BB agonist as described herein, e.g., Utomilumab. In an embodiment, Utomilumab is administered intravenously at doses ranging from 0.05 mg/kg to 5.0 mg/kg.

[0540] In one embodiment, subject is administered the cell therapy product (e.g., CAR-T) and the bispecific/multispecific engager, e.g., a bispecific antibody, after administration of lymphodepleting chemotherapy. Several lymphodepleting chemotherapy regimens are known in the art. An exemplary lymphodepleting chemotherapy regimen includes 30 mg/m²/day fludarabine intravenously plus 500 mg/m²/day cyclophosphamide intravenously x 3 days. In an exemplary embodiment, the subject is administered cell therapy product (e.g., CAR-T) 1 day after finishing the administration of the lymphodepleting chemotherapy. The bispecific/multispecific engager, e.g., a bispecific antibody, can be administered to the subject concurrently with the administration of the cell therapy product (e.g., CAR-T), prior to the administration of the cell therapy product (e.g., CAR-T) or after the administration of the cell therapy product (e.g., CAR-T). In the preferred embodiment, the subject is administered the bispecific/multispecific engager, e.g., a bispecific antibody, after the administration of the cell therapy product (e.g., CAR-T).

[0541] In certain embodiments, the methods or uses are carried out in combination with an agent that increases the efficacy of the cell therapy product (e.g., CAR-T), e.g., an agent as described herein. For example, in one embodiment, the agent can be an agent, which inhibits an inhibitory molecule. Examples of inhibitory molecules include PDi, PD-L1, CTLA4, TIM3, CEACAM (e.g., CEACAM-1, CEACAM-3 and/or CEACAM-5), LAG3, VISTA, BTLA, TIGIT, LAIR1, CD160, 2B4 and TGF beta. In one embodiment, the agent is a PD-1 antibody, e.g., Pembrolizumab.

[0542] In one embodiment, the cell therapy product (e.g., CAR-T) and the bispecific antibody described herein, are administered in combination with an agent that ameliorates one or more side effect associated with administration of a cell expressing immune effector cells and/or bispecific antibody, e.g., an agent described herein. For example, an immune effector T cell and the bispecific antibody is administered in combination steroids, an IL6R antagonist (e.g. Tocilizumab), an IL1R antagonist (e.g., Anakinra), a TRAIL antagonist (e.g. a DR5-Fc or a neutralizing antibody against TRAIL, e.g., MAB375-SP).

[0543] In one embodiment, the reaction mixture further comprises a cryoprotectant or stabilizer such as, e.g., a saccharide, an oligosaccharide, a polysaccharide and a polyol (e.g., trehalose, mannitol, sorbitol, lactose, sucrose, glucose and dextran), salts and crown ethers. In one embodiment, the cryoprotectant is dextran.

[0544] In one embodiment, the subject, e.g., the subject from which immune cells are acquired and/or the subject treated, is a human, e.g., a cancer patient. In some embodiments, the subject from whom the immune cells are acquired is a healthy donor. In some embodiments, the subject from whom the immune cells are acquired has received a mobilizing agent, e.g., a CXCR4 antagonist.

[0545] In certain embodiments, the subject has a disease associated with expression of a tumor- or cancer associated-antigen, e.g., a disease as described herein. In one embodiment, the subject has a cancer, e.g., a cancer as described herein.

[0546] In one embodiment, the subject has a cancer that is chosen from a hematological cancer, a solid tumor, or a metastatic lesion thereof. In preferred embodiment, the cancer is a solid tumor.

[0547] In embodiments, the subject does not have a relapsed cancer. In other embodiments, the subject has a relapsed cancer.

[0548] In one embodiment, the immune cell (e.g., the population of immune effector cells) is acquired, e.g., obtained, from a subject having a solid tumor, e.g., breast, lung, prostate, skin, gastrointestinal, brain, endocrine, endometrial, ovarian, cervical and hepatic cancer.

[0549] In one embodiment, the immune cell (e.g., the population of immune effector cells) is acquired, e.g., obtained, from a subject who is an allogeneic donor, e.g., a healthy donor, e.g., a person who does not have cancer.

[0550] The following assays can be used to assay the phenotype and funcational activity of immune cells, e.g., T cells that have been expanded/activated by use of bispecific/multispecific engagers, e.g., bispecific antibodies, as described herein. These assay can be also used to assay T cells that express a CAR or a recombinant TCR and have been expanded using other means, such as using CD3×CD28 beads or co-culture with Mantle Cell Lymphoma derived cell lines, e.g., REC-1 cells. The assays can be also used to assay the phenotype and funcational activity of immune cells generated using other methods of the disclosure, e.g., using inhibitors of TRAIL or by expressing constitutive active mutant of JAK3.

[0551] Further, in addition to CD4 and CD8 markers, other phenotypic markers vary significantly, but in large part, reproducibly during the course of the cell expansion process. Thus, such reproducibility enables the ability to tailor an activated T cell product for specific purposes.

[0552] Once a CAR described herein is constructed, various assays can be used to evaluate the activity of the molecule, such as but not limited to, the ability to expand T cells following antigen stimulation, sustain T cell expansion in the absence of re-stimulation, and anti-cancer activities in appropriate in vitro and animal models. Assays to evaluate the effects of a cars of the disclosure are described in further detail below

[0553] Western blot analysis of CAR expression in primary T cells can be used to detect the presence of monomers and dimers. See, e.g., Milone et al., Molecular Therapy 17(8): 1453-1464 (2009).

[0554] In vitro expansion of CAR+ T cells following antigen stimulation can be measured by flow cytometry. Sustained CAR+ T cell expansion in the absence of re-stimulation can also be measured. See, e.g., Milone et al., Molecular Therapy 17(8): 1453-1464 (2009). Animal models can also be used to measure a CART activity.

[0555] Assessment of cell proliferation and cytokine production has been previously described, e.g., at Milone et al., Molecular Therapy 17(8): 1453-1464 (2009).

[0556] Imaging technologies can be used to evaluate specific trafficking and proliferation of CARs in tumor-bearing animal models. Such assays have been described, for example, in Barrett et al., Human Gene Therapy 22:1575-1586 (2011).

[0557] Other assays, including those described in the Example section herein as well as those that are known in the art can also be used to evaluate the CARs, TCRs, TILs and other immune effector cells described herein.

[0558] In one aspect, the disclosure provides methods for treating a disease associated with expression of a cancer associated antigen described herein.

[0559] In one aspect, the disclosure provides methods of treating cancer by providing to the subject in need thereof immune effector cells (e.g., T cells, NK cells) that are engineered to express an XCAR or an XTCR, wherein X represents a tumor antigen as described herein, and wherein the cancer cells express said X tumor antigen.

[0560] In one aspect, the disclosure provides methods of treating cancer by providing to the subject in need thereof immune effector cells (e.g., T cells, NK cells) that are engineered to express a XCAR or a XTCR described herein, wherein the cancer cells express X. In one embodiment, X is expressed on both normal cells and cancers cells, but is expressed at lower levels onirnormal cells. In one embodiment, the method further comprises selecting a CAR or a TCR that binds X with an affinity that allows the XCAR to bind and kill the cancer cells expressing X but less than 30%, 25%, 20%, 15%, 10%, 5% or less of the normal cells expressing X are killed, e.g., as determined by an assay described herein. Tabe 7F provides a list of different antigens and the exemplary diseases that can be prevented, inhibited or treated using immune effector cells expressing CAR/TCR targeting these antigens and using the methods of the disclosure.

TABLE 7F

| CAR/TCR “X” | EXEMPLARY DISEASE TARGETED BY CARs (i.e. conventional CARs |
|---|---|
| TARGET | and next generation CARs. E.g., SIR, Ab-TCR, TFP and zSIR) or TCRs |
| CD19 | ALL, CLL, lymphoma, lymphoid blast crisis of CML, multiple myeloma, |
| | immune disorders |
| ALK | Non Small Cell Lung Cancer (NSCLC), ALCL (anaplastic large cell |
| | lymphoma), IMT (inflammatory myofibroblastic tumor), or neuroblastoma |
| CD45 | Blood cancers |
| BCMA | Myeloma, PEL, plasma cell leukemia, Waldenstrom's macroglobinemia |
| CD5 | Blood cancer, T cell leukemia, T cell lymphoma |
| CD20/MS4A1 | Blood cancers, Leukemia, ALL, CLL, lymphoma, immune disorders |
| CD22 | Blood cancers, Leukemia, ALL, CLL, lymphoma, lymphoid blast crisis of |
| | CML, immune disorders |
| CD23 | Blood cancers, Leukemia, ALL, CLL, lymphoma, autoimmune disorders |
| CD30 | Hodgkins's lymphoma, Cutaneous T cell lymphoma |
| CD32 | Solid tumors |
| CD33 | Blood cancers, AML, MDS |
| CD34 | Blood cancers, AML, MDS |
| CD44v6 | Blood cancers, AML, MDS |
| CD70 | Blood cancers, lymphoma, myeloma, waldenstrom's macroglobulinemia |
| CD79b | Blood cancers, ALL, Lymphoma |
| CD123 | Blood cancers, AML, MDS |
| CD138 | Blood cancers, Myeloma, PEL, plasma cell leukemia, waldenstrom's |
| | macroglobulinemia |
| CD179b | Blood cancers, ALL, Lymphoma |
| CD276/B7-H3 | Ewing's sarcoma, neuroblastoma, rhabdomyosarcoma, ovarian, colorectal and |
| | lung cancers |
| CD324 | Solid tumors, esophageal, prostate, colorectal, breast, lung cancers |
| CDH6 | Solid tumors, renal, ovarian, thyroid cancers |
| CDH17 | Adenocarciniomas, gastrointestinal, lung, ovarian, endometrial cancers |
| CDH19 | Solid tumor, Melanoma |
| EGFR | Colon cancer, lung cancer |
| CLEC5A | Blood cancers, Leukemia, AML |
| GR/LHR | Prostate cancer, ovarian cancer or breast cancer |
| CLL1 | Blood cancer, Leukemia |
| CMVpp65 | CMV infection, CMV colitis, CMV pneumonitis |
| CS1 | Blood cancers, myeloma, PEL, plasma cell leukemia |
| CSF2RA | AML, CML, MDS |
| CD123 | Blood cancers, AML, MDS |
| DLL3 | Melanoma, lung cancer or ovarian cancer |
| EBNA3c/MHC I | Epstein Barr virus infection and related diseases including cancers |
| EBV-gp350 | Epstein Barr virus infection and related diseases |
| EGFR | Solid tumors, Colon cancer, lung cancer |
| EGFRvIII | Solid tumors, glioblastoma |
| EpCam1 | Gastrointestinal cancer |
| FLT3 | Blood cancers, AML, MDS, ALL |
| Folate Receptor | Ovarian cancer, NSCLC, endometrial cancer, renal cancer, or other |
| alpha(FR1 or FOLR1) | solid tumors |
| FSHR | Prostate cancer, ovarian cancer or breast cancer |
| GD2 | Neuroblastoma |
| GD3 | Melanoma |
| GFRa4 | Cancer, thyroid medullary cancer |
| Fucosyl-GM1(GM1) | Small cell lung cancer |
| GPRC5D | Myeloma, PEL, plasma cell leukemia, waldenstrom's macroglobulinemia |
| gp100 | Melanoma |
| GPC3 | Solid tumors, Lung cancer |
| gpNMB | Melanoma, brain tumors, gastric cancers |
| GRP78 | Myeloma |
| Her2 | Solid tumors, breast cancer, stomach cancer |
| Her3 | Colorectal, breast cancer |
| HMW-MAA | Melanoma |
| HTLV1-TAX/MHC I | HTLV1 infection associated diseases, Adult T cell leukemia-lymphoma |
| IL11Ra | Blood cancers, AML, ALL, CML, MDS, sarcomas |
| IL6Ra | Solid tumors, Liver cancer |
| IL13Ra2 | Glioblastomas |
| KSHV-K8.1 | Kaposi's sarcoma, PEL, Multicentric Castleman's disease |
| LAMP1 | Blood cancers, AML, ALL, MDS, CLL, CML |
| LewisY | Cancers |
| L1CAM | Solid tumors, ovarian, breast, endometrial cancers, melanoma |
| LHR | Prostate cancer, ovarian cancer or breast cancer |
| Lym1 | Blood cancer, Leukemia, Lymphoma |
| Lym2 | Blood cancer, Leukemia, Lymphoma |
| CD79b | Blood cancers, lymphoma |
| MART1/MHC I | Melanoma |
| Mesothelin | Mesothelioma, ovarian cancer, pancreatic cancer |
| Muc1/MHC I | Breast cancer, gastric cancer, colorectal cancer, lung cancer, or |
| | other solid tumors |
| Muc16 | Ovarian cancer |
| NKG2D | Leukemia, lymphoma or myeloma |
| NYBR1 | Breast cancer |
| PSCA | Prostate cancer |
| PR1/MHC I | Blood cancer, Leukemia |
| Prolactin Receptor | Breast cancer, chromophobe renal cell cancer |
| PSMA | Prostate cancer |
| PTK7 | Melanoma, lung cancer or ovarian cancer |
| ROR1 | Blood cancer, B cell malignancy, lymphoma, CLL |
| SLea | Pancreatic cancer, colon cancer |
| SSEA4 | Pancreatic cancer |
| Tyrosinase/MHC I | Melanoma |
| TCRB1 | T cell leukemias and lymphomas, autoimmune disorders |
| TCRB2 | T cell leukemias and lymphomas, autoimmune disorders |
| TCRgd | T cell leukemias and lymphomas, autoimmune disorders |
| hTERT | Solid tumors, blood cancers |
| TGFBR2 | Solid tumors, keloid |
| TIM1/HAVCR1 | Kidney cancer, liver cancer |
| TROP2 | Solid tumors, Breast cancer, prostate cancer |
| TSHR | Thyroid cancer, T cell leukemia, T cell Lymphoma |
| TSLPR | Blood cancers, Leukemias, AML, MDS |
| Tyrosinase/MHC I | Melanoma |
| VEGFR3 | Solid tumors |
| WT1/MHC I | Blood cancers, AML |
| Folate Receptorβ | AML, Myeloma |
| B7H4 | Breast cancer or ovarian cancer |
| CD23 | Blood cancers, Leukemias, CLL |
| GCC | Gastrointestinal cancer |
| CD200R | Blood cancers, AML, MDS |
| AFP/MHC I | Solid tumors, Liver cancer |
| CD99 | Liver cancer |
| GPRC5D | Myeloma, waldenstrom's macroglobinemia |
| HPV16-E7/MHC I | HPV16 associated cancers, cervical cancer, head and neck cancers |
| Tissue Factor 1 | Solid tumors |
| (TF1) | |
| Tn-Muc1 | Solid tumors and blood cancers |
| Igk-Light Chain | Myeloma, plasma cell leukemia |
| Ras G12V/MHC I | Solid tumors and blood cancers |
| CLD18A2 | Gastric, pancreatic, esophageal, ovarian, or lung cancer |
| (Claudin 18.2) | |
| CD43 | Blood cancers, AML |
| NY-ESO-1/MHC I | Myeloma |
| MPL/TPO-R | Blood cancer, AML, MDS, CML, ALL |
| P-glycoprotein | Renal cancer, liver cancer, Myeloma |
| (MDR1) | |
| CD179a | Blood cancers, Acute Leukemia, CLL, ALL, Lymphoma |
| STEAP1 | Gastric or prostate cancer, or lymphoma |
| Liv1 (SLC39A6) | Breast or prostate cancer |
| Nectin4 (PVRL4) | Bladder, renal, cervical, lung, head and neck or breast cancer |
| Cripto (TDGF1) | Colorectal or endometrial or ovarian cancer |
| gpA33 | Colorectal or endometrial or ovarian cancer |
| FLT3 | Blood cancers, AML, ALL, MDS |
| BST1/CD157 | Blood cancers, AML, MDS |
| IL1RAP | Liver, colorectal, cervical, lung or ovarian cancer |
| Chloride channel | Glioma |
| IgE | Allergy |
| HLA-A2 | Graft vs host disease, tissue rejection (SIR Expressed in regulatory T cells) |
| Amyloid | Amyloidoses, alzheimer's disease |
| HIV1-env | HIVI/AIDS and related conditions |
| HIV1-gag | HIV1/AIDS and related conditions |
| Influenza A HA | Influenza A infection |
| Integrin B7 | Plasma cell neoplasms, primary effusion lymphoma |
| Muc17 | Pancreatic cancer, colon cancer |
| CD16ORF54 | Blood cancers |
| VISTA | Blood cancers |
| Muc5Ac | Pancreatic cancer, stomach cancer, colon cancer |
| FCRH5 | Plasma cell neoplasm |
| LYPD1 | Ovarian cancer, endometrial cancer, melanoma |
| EMR2 | Acute Leukemia, Lymphoma, breast cancer, colon cancer |
| gpNMB | Melanoma, brain cancer, breast cancer, solid tumors |
| RNF43 | Colorectal cancer, breast cancer, endometrial cancer |
| CD44v6 | Epithelial cancers |
| Robo4 | Renal, colon, breast cancer, solid tumors |
| GPC3 | Liver cancer, lung cancer, breast cancer |
| FOLR1 | Ovarian cancer, lung cancer, kidney cancer, solid tumors |
| CLDN6 | Ovarian cancer, liver cancer |
| MMP16 | Melanoma, brain cancer, small lung cancer, neuroblastoma |
| BMPR1B | Prostat cancer, breast cancer, ovarian cancer |
| Ly6E | Breast, ovarian, pancreatic, lung |
| WISP1 | Glioblastoma, breast cancer |
| SLC34A2 | Lung cancer, ovarian cancer, endometrial cancer |
| CD133 | Lung cancer, brain cancer |

[0561] In one embodiment, the disclosure provides methods of treating cancer by providing to the subject in need thereof immune effector cells (e.g., T cells, NK cells) that are engineered to express CDT19 CAR, wherein the cancer cells express CDT19. In one embodiment, the cancer to be treated is ALL (acute lymphoblastic leukemia), CLL (chronic lymphocytic leukemia), DLBCL (diffuse large B-cell lymphoma), MCL (Mantle cell lymphoma, or MM (multiple myeloma).

[0562] In one embodiment, the disclosure provides methods of treating an inmm-une disorder by providing to the subject in need thereof immune effector cells (e.g., T cells, NK cells) that are engineered to express CDT9 CAR, wherein the disease causing or disease associated cells express CDT9. In one embodiment, the immune disorder is an autoimmune disorder (e.g., lupus, SLE, rheumatoid arthritis, sjogren syndrome, sarcoidosis etc.).

[0563] In one embodiment, the disclosure provides methods of treating cancer by providing to the subject in need thereof immune effector cells (e.g., T cells, NK cells) that are engineered to express CD22 CAR, wherein the cancer cells express CD22. In one embodiment, the cancer to be treated is ALL (acute lymphoblastic leukemia), CLL (chronic lymphocytic leukemia), DLBCL (diffuse large B-cell lymphoma), or MCL (Mantle cell lymphoma.

[0564] In one embodiment, the disclosure provides methods of treating cancer by providing to the subject in need thereof immune effector cells (e.g., T cells, NK cells) that are engineered to express CD20/MS4A1 CAR, wherein the cancer cells express CD20/MS4A1. In one embodiment, the cancer to be treated is ALL (acute lymphoblastic leukemia), CLL (chronic lymphocytic leukemia), DLBCL (diffuse large B-cell lymphoma), or MCL (Mantle cell lymphoma.

[0565] In one embodiment, the disclosure provides methods of treating an immune disorder by providing to the subject in need thereof immune effector cells (e.g., T cells, NK cells) that are engineered to express CD20, CD22, BCMA, CS1 or CD138 CAR, wherein the disease causing or disease associated cells express CD20, CD22, BCMA, CS1 or CD138. In one embodiment, the immune disorder is an autoimmune disorder (e.g., lupus, SLE, rheumatoid arthritis, sjogren syndrome, sarcoidosis etc.).

[0566] In one embodiment, the disclosure provides methods of treating cancer by providing to the subject in need thereof immune effector cells (e.g., T cells, NK cells) that are engineered to express BCMA CAR, wherein the cancer cells express BCMA. In one embodiment, the cancer to be treated is plasma cell disorder (e.g., myeloma) or primary effusion lymphoma.

[0567] In one aspect, the disclosure provides methods of treating cancer by providing to the subject in need thereof immune effector cells (e.g., T cells, NK cells) that are engineered to express an EGFRvIIICAR (or EGFRviiiCAR), wherein the cancer cells express EGFRvlll (or EGFRviii). In one embodiment, the cancer to be treated is glioblastoma.

[0568] In one aspect, the disclosure provides methods of treating cancer by providing to the subject in need thereof immune effector cells (e.g., T cells, NK cells) that are engineered to express a mesothelinCAR (MSLN-CAR), wherein the cancer cells express mesothelin (MSLN). In one embodiment, the cancer to be treated is mesothelioma, pancreatic cancer, gastrointestinal cancer, lung cancer, breast cancer or ovarian cancer.

[0569] In one aspect, the disclosure provides methods of treating cancer by providing to the subject in need thereof immune effector cells (e.g., T cells, NK cells) that are engineered to express a CD123CAR, wherein the cancer cells express CD123. In one embodiment, the cancer to be treated is AML.

[0570] In one aspect, the disclosure provides methods of treating cancer by providing to the subject in need thereof immune effector cells (e.g., T cells, NK cells) that are engineered to express a CS-1CAR, wherein the cancer cells express CS-1. In one embodiment, the cancer to be treated is multiple myeloma or primary effusion lymphoma.

[0571] In one aspect, the disclosure provides methods of treating cancer by providing to the subject in need thereof immune effector cells (e.g., T cells, NK cells) that are engineered to express a CLL-1CAR, wherein the cancer cells express CLL-1. In one embodiment, the cancer to be treated is AML.

[0572] In one aspect, the disclosure provides methods of treating cancer by providing to the subject in need thereof immune effector cells (e.g., T cells, NK cells) that are engineered to express a CD33CAR, wherein the cancer cells express CD33. In one embodiment, the cancer to be treated is AML.

[0573] In one aspect, the disclosure provides methods of treating cancer by providing to the subject in need thereof immune effector cells (e.g., T cells, NK cells) that are engineered to express a MPL-CAR, wherein the cancer cells express MPL (or Thrombopoietin receptor). In one embodiment, the cancer to be treated is AML or MDS.

[0574] In one aspect, the disclosure provides methods of treating cancer by providing to the subject in need thereof immune effector cells (e.g., T cells, NK cells) that are engineered to express a GD2CAR, wherein the cancer cells express GD2. In one embodiment, the cancer to be treated is neuroblastoma.

[0575] In one aspect, the disclosure provides methods of treating cancer by providing to the subject in need thereof immune effector cells (e.g., T cells, NK cells) that are engineered to express a TnCAR, wherein the cancer cells express Tn antigen. In one embodiment, the cancer to be treated is ovarian cancer.

[0576] In one aspect, the disclosure provides methods of treating cancer by providing to the subject in need thereof immune effector cells (e.g., T cells, NK cells) that are engineered to express a PSMACAR, wherein the cancer cells express PSMA. In one embodiment, the cancer to be treated is prostate cancer.

[0577] In one aspect, the disclosure provides methods of treating cancer by providing to the subject in need thereof immune effector cells (e.g., T cells, NK cells) that are engineered to express a ROR1CAR, wherein the cancer cells express ROR1. In one embodiment, the cancer to be treated is B cell malignancies.

[0578] In one aspect, the disclosure provides methods of treating cancer by providing to the subject in need thereof immune effector cells (e.g., T cells, NK cells) that are engineered to express a FLT3 CAR, wherein the cancer cells express FLT3. In one embodiment, the cancer to be treated is AML.

[0579] In one aspect, the disclosure provides methods of treating cancer by providing to the subject in need thereof immune effector cells (e.g., T cells, NK cells) that are engineered to express a CD38CAR, wherein the cancer cells express CD38. In one embodiment, the cancer to be treated is multiple myeloma.

[0580] In one aspect, the disclosure provides methods of treating cancer by providing to the subject in need thereof immune effector cells (e.g., T cells, NK cells) that are engineered to express a CD44v6CAR, wherein the cancer cells express CD44v6. In one embodiment, the cancer to be treated is cervical cancer, AML, or MM.

[0581] In one aspect, the disclosure provides methods of treating cancer by providing to the subject in need thereof immune effector cells (e.g., T cells, NK cells) that are engineered to express a CEACAR, wherein the cancer cells express CEA. In one embodiment, the cancer to be treated is pastrointestinal cancer, or pancreatic cancer.

[0582] In one aspect, the disclosure provides methods of treating cancer by providing to the subject in need thereof immune effector cells (e.g., T cells, NK cells) that are engineered to express a B7H3CAR, wherein the cancer cells express B7H3.

[0583] In one aspect, the disclosure provides methods of treating cancer by providing to the subject in need thereof immune effector cells (e.g., T cells, NK cells) that are engineered to express a KITCAR, wherein the cancer cells express KIT. In one embodiment, the cancer to be treated is gastrointestinal cancer.

[0584] In one aspect, the disclosure provides methods of treating cancer by providing to the subject in need thereof immune effector cells (e.g., T cells, NK cells) that are engineered to express an IL-13Ra2CAR, wherein the cancer cells express IL-13Ra2. In one embodiment, the cancer to be treated is glioblastoma.

[0585] In one aspect, the disclosure provides methods of treating cancer by providing to the subject in need thereof immune effector cells (e.g., T cells, NK cells) that are engineered to express a CD30CAR, wherein the cancer cells express CD30. In one embodiment, the cancer to be treated is lymphomas, or leukemias.

[0586] In one aspect, the disclosure provides methods of treating cancer by providing to the subject in need thereof immune effector cells (e.g., T cells, NK cells) that are engineered to express a GD3CAR, wherein the cancer cells express GD3. In one embodiment, the cancer to be treated is melanoma.

[0587] In one aspect, the disclosure provides methods of treating cancer by providing to the subject in need thereof immune effector cells (e.g., T cells, NK cells) that are engineered to express an IL-11RaCAR, wherein the cancer cells express IL-11Ra. In one embodiment, the cancer to be treated is osteosarcoma.

[0588] In one aspect, the disclosure provides methods of treating cancer by providing to the subject in need thereof immune effector cells (e.g., T cells, NK cells) that are engineered express a PSCACAR, wherein the cancer cells express PSCA. In one embodiment, the cancer to be treated is prostate cancer.

[0589] In one aspect, the disclosure provides methods of treating cancer by providing to the subject in need thereof immune effector cells (e.g., T cells, NK cells) that are engineered to express a VEGFR2CAR, wherein the cancer cells express VEGFR2. In one embodiment, the cancer to be treated is a solid tumor.

[0590] In one aspect, the disclosure provides methods of treating cancer by providing to the subject in need thereof immune effector cells (e.g., T cells, NK cells) that are engineered to express a LewisYCAR, wherein the cancer cells express LewisY. In one embodiment, the cancer to be treated is ovarian cancer, or AML.

[0591] In one aspect, the disclosure provides methods of treating cancer by providing to the subject in need thereof immune effector cells (e.g., T cells, NK cells) that are engineered to express a CD24CAR, wherein the cancer cells express CD24. In one embodiment, the cancer to be treated is pancreatic cancer.

[0592] In one aspect, the disclosure provides methods of treating cancer by providing to the subject in need thereof immune effector cells (e.g., T cells, NK cells) that are engineered to express a Folate receptor alphaCAR, wherein the cancer cells express folate receptor alpha. In one embodiment, the cancer to be treated is ovarian cancer, NSCLC, endometrial cancer, renal cancer, or other solid tumors.

[0593] In one aspect, the disclosure provides methods of treating cancer by providing to the subject in need thereof immune effector cells (e.g., T cells, NK cells) that are engineered to express an ERBB2CAR, wherein the cancer cells express ERBB2 (Her2/neu). In one embodiment, the cancer to be treated is breast cancer, gastric cancer, colorectal cancer, lung cancer, or other solid tumors.

[0594] In one aspect, the disclosure provides methods of treating cancer by providing to the subject in need thereof immune effector cells (e.g., T cells, NK cells) that are engineered to express a MUCICAR, wherein the cancer cells express MUCl. In one embodiment, the cancer to be treated is breast cancer, lung cancer, or other solid tumors.

[0595] In one aspect, the disclosure provides methods of treating cancer by providing to the subject in need thereof immune effector cells (e.g., T cells, NK cells) that are engineered to express an EGFRCAR, wherein the cancer cells express EGFR. In one embodiment, the cancer to be treated is glioblastoma, SCLC (small cell lung cancer), SCCHN (squamous cell carcinoma of the head and neck), NSCLC, or other solid tumors.

[0596] In one aspect, the disclosure provides methods of treating cancer by providing to the subject in need thereof immune effector cells (e.g., T cells, NK cells) that are engineered to express a CAIXCAR, wherein the cancer cells express CAIX. In one embodiment, the cancer to be treated is renal cancer, CRC, cervical cancer, or other solid tumors.

[0597] In one aspect, the disclosure provides methods of treating cancer by providing to the subject in need thereof immune effector cells (e.g., T cells, NK cells) that are engineeredto express a GD3CAR, wherein the cancer cells express GD3. In one embodiment, the cancer to be treated is melanoma.

[0598] In one aspect, the disclosure provides methods of treating cancer by providing to the subject in need thereof immune effector cells (e.g., T cells, NK cells) that are engineered to express a Fucosyl GMICAR, wherein the cancer cells express Fucosyl GM.

[0599] In another aspect, a method of treating a subject, e.g., reducing or ameliorating, a hyperproliferative condition or disorder (e.g., a cancer), e.g., solid tumor, a soft tissue tumor, or a metastatic lesion, in a subject is provided. Without wishing to be bound by any particular theory, the anti-tumor immunity response elicited by the cell therapy product (e.g., CAR-modified immune effector cells; e.g., T cells, NK cells) may be an active or a passive immune response, or alternatively may be due to a direct vs indirect immune response.

[0600] In one aspect, the cell therapy products (e.g., CAR-expressing T cells, NK cells) of the disclosure may be a type of vaccine for ex vivo immunization and/or in vivo therapy in a mammal. In one aspect, the mammal is a human.

[0601] In addition to using a cell-based vaccine in terms of ex vivo immunization, the disclosure also provides compositions and methods for in vivo immunization to elicit an immune response directed against an antigen in a patient.

[0602] Generally, the cells activated and expanded as described herein may be utilized in the treatment and prevention of diseases that arise in individuals who are immunocompromised. In particular, the cell therapy products (e.g., CAR/TCR-modified immune effector cells; e.g., T cells, NK cells) of the disclosure are used in the treatment of diseases, disorders and conditions associated with expression of a cancer associate antigen as described herein. In certain aspects, the cell therapy products of the disclosure are used in the treatment of patients at risk for developing diseases, disorders and conditions associated with expression of a cancer associate antigen as described herein. Thus, the disclosure provides methods for the treatment or prevention of diseases, disorders and conditions associated with expression of a cancer associate antigen as described herein comprising administering to a subject in need thereof, a therapeutically effective amount of the cell therapy products of the disclosure.

[0603] In one aspect the cell therapy products (e.g., CAR/TCR-modified immune effector cells; e.g., T cells, NK cells) of the disclosures may be used to treat a proliferative disease such as a cancer or malignancy or is a precancerous condition such as a myelodysplasia, a myelodysplastic syndrome or a preleukemia. Further a disease associated with a cancer associate antigen as described herein expression include, but not limited to, e.g., atypical and/or non-classical cancers, malignancies, precancerous conditions or proliferative diseases expressing a cancer associated antigen as described herein. Non-cancer related indications associated with expression of a cancer associate antigen as described herein include, but are not limited to, e.g., autoimmune disease, (e.g., lupus), inflammatory disorders (allergy and asthma) and transplantation.

[0604] The cell therapy products (e.g., CAR/TCR-modified immune effector cells; e.g., T cells, NK cells) of the disclosure may be administered either alone, or as a pharmaceutical composition in combination with diluents and/or with other components such as IL-2 or other cytokines or cell populations.

[0605] The disclosure provides methods for preventing relapse of cancer associated with a cancer associated antigen as described herein-expressing cells, the methods comprising administering to a subject in need thereof a cell therapy product (e.g., CAR/TCR-modified immune effector cells; e.g., T cells, NK cells) of the disclosure that binds to a cancer associated antigen as described herein-expressing cell. In one aspect, the methods comprise administering to the subject in need thereof an effective amount of a cell therapy product (e.g., CAR/TCR-modified immune effector cells; e.g., T cells, NK cells) described herein that binds to a cancer associated antigen as described herein-expressing cell in combination with an effective amount of another therapy.

[0606] A cell therapy product (e.g., CAR/TCR-modified immune effector cells; e.g., T cells, NK cells) described herein may be used in combination with other known agents and therapies.

[0607] A cell therapy product (e.g., CAR/TCR-modified immune effector cells; e.g., T cells, NK cells) described herein and the at least one additional therapeutic agent can be administered simultaneously, in the same or in separate compositions, or sequentially. For sequential administration, the cell therapy products (e.g., CAR/TCR-modified immune effector cells; e.g., T cells, NK cells) described herein can be administered first, and the additional agent can be administered second, or the order of administration can be reversed.

[0608] The cell therapy products (e.g., CAR/TCR-modified immune effector cells; e.g., T cells, NK cells) and/or other therapeutic agents, procedures or modalities can be administered during periods of active disorder, or during a period of remission or less active disease. The cell therapy products (e.g., CAR/TCR-modified immune effector cells; e.g., T cells, NK cells) can be administered before the other treatment, concurrently with the treatment, post-treatment, or during remission of the disorder.

[0609] When administered in combination, the cell therapy products (e.g., CAR/TCR-modified immune effector cells; e.g., T cells, NK cells) and the additional agent (e.g., second or third agent), or all, can be administered in an amount or dose that is higher, lower or the same than the amount or dosage of each agent used individually, e.g., as amonotherapy. In certain embodiments, the administered amount or dosage of the cell therapy, the additional agent (e.g., second or third agent), or all, is lower (e.g., at least 20%, at least 30%, at least 40%, or at least 50%) than the amount or dosage of each agent used individually, e.g., as a monotherapy. In other embodiments, the amount or dosage of the cell therapy, the additional agent (e.g., second or third agent), or all, that results in a desired effect (e.g., treatment of cancer) is lower (e.g., at least 20%, at least 30%, at least 40%, or at least 50% lower) than the amount or dosage of each agent used individually, e.g., as a monotherapy, required to achieve the same therapeutic effect.

[0610] In further aspects, a cell therapy product (e.g., CAR/TCR-modified immune effector cells; e.g., T cells, NK cells) described herein may be used in a treatment regimen in combination with intratumoral administration of an immune modulating agent. In some embodiment, the immune modulating agent is IL2. In some embodiments, the immune modulating agent is an agent that activates NF-κB signaling pathway. Exemplary immune modulating agents that can activate NF-κB signaling pathway include one or more of vFlip K13 (SEQ ID NO (DNA): 2357; SEQ ID NO (PRT): 2467), human NEMO K277A mutant (SEQ ID NO (DNA): 2358 and SEQ ID NO (PRT)): 2468) and human IKK2-S177E-S181E mutant (SEQ ID NO (DNA): 2359 and SEQ ID NO (PRT): 2469). In some embodiment, the immune modulating agent, e.g., IL2, vFLIP K13 SEQ ID NO (DNA): 2357, human NEMO K277A mutant (SEQ ID NO (DNA) and/or human IKK2-S177E-S181E mutant (SEQ ID NO (DNA): 2359 are administered to the tumor by transfection, e.g. by electroporation, of the nucleic acids encoding the corresponding gene or cDNA. In some embodiment, the immune modulating agent, e.g., IL2, vFLIP K13 SEQ ID NO (DNA): 2357, human NEMO K277A mutant (SEQ ID NO (DNA) and/or human IKK2-S177E-S181E mutant (SEQ ID NO (DNA): 2359 are administered to the tumor using viral vectors, e.g, viral vectors described herein, e.g., lentiviral vector, AAV vector or Adenoviral vector, encoding the corresponding gene or cDNA. In some embodiments, the immune modulatory agent is delivered about 2 days (e.g., 1 day, 2 days, 3 days, 7 days etc.) before the administration of immune effector cells. In some embodiments, the immune modulatory agent is delivered about 2 days (e.g., 1 day, 2 days, 3 days, 7 days etc.) after the administration of immune effector cells.

[0611] In one embodiment, a cell therapy product (e.g., CAR/TCR-modified immune effector cells; e.g., T cells, NK cells) described herein can be used in combination with a chemotherapeutic agent.

[0612] In an exemplary embodiment, a cell therapy product described herein is a CD19 CART product and administered to a subject who has a CD19+ lymphoma, e.g., a CD19+ Non-Hodgkin's Lymphoma (NHL), a CD19+FL, or a CD19+ DLBCL. In embodiments, the subject has a relapsed or refractory CD19+ lymphoma. In embodiments, a lymphodepleting chemotherapy is administered to the subject prior to, concurrently with, or after administration (e.g., infusion) of CD19 CAR-T cells. In an example, the lymphodepleting chemotherapy is administered to the subject prior to administration of CD19 CART cells. For example, the lymphodepleting chemotherapy ends 1-4 days (e.g., 1, 2, 3, or 4 days) prior to CD19 CART cell infusion. In embodiments, multiple doses of CD19 CART cells are administered, e.g., as described herein. For example, a single dose comprises about 5×10′ CD19 CART cells. In embodiments, a lymphodepleting chemotherapy is administered to the subject prior to, concurrently with, or after administration (e.g., infusion) of a CAR-expressing cell described herein, e.g., anon-CD19 CAR-expresing cell. In embodiments, a CD19 CART is administered to the subject prior to, concurrently with, or after administration (e.g., infusion) of a non-CD19 CAR-expressing cell, e.g., a non-CD19 CAR-expressing cell describedherein.

[0613] In some embodiments, a CAR-expressing cell described herein is administered to a subject in combination with an interleukin-15 (IL-15) polypeptide, an interleukin-15 receptor alpha (IL-15Ra) polypeptide, or a combination of both a IL-15 polypeptide and a IL-15Ra polypeptide e.g., hetIL-15 (Admune Therapeutics, LLC).

[0614] In one embodiment, the subject can be administered an agent which reduces or ameliorates a side effect associated with the administration of a CAR-expressing cell. Side effects associated with the administration of a CAR-expressing cell include, but are not limited to CRS, and hemophagocytic lymphohistiocytosis (HLH), also termed Macrophage Activation Syndrome (MAS) and neurological complications (e.g., seizures, aphasia, confusion, coma etc.).

[0615] Accordingly, the methods described herein can comprise administering a CAR-expressing cell described herein to a subject and further administering one or more agents to manage elevated levels of a soluble factor resulting from treatment with a CAR-expressing cell. In one embodiment, the soluble factor elevated in the subject is one or more of IFN-γ, TNFα, IL-2 and IL-6. In an embodiment, the factor elevated in the subject is one or more of IL-1, GM-CSF, IL-10, IL-8, IL-5 and fraktalkine. Therefore, an agent administered to treat this side effect can be an agent that neutralizes one or more of these soluble factors. In one embodiment, the agent that neutralizes one or more of these soluble forms is an antibody or antigen binding fragment thereof. Examples of such agents include, but are not limited to a steroid (e.g., corticosteroid), an inhibitor of TNFα, and an inhibitor of IL-6.

[0616] The present disclosure also provides inhibitors of TRAIL and/or DR5 and method of use of such inhibitors for reducing, preventing and/or treating the side effects of immune therapy and cell therapy products, e.g., CAR-T, TCR-T cells and Bispecific T cell engagers (BiTE). In an embodiment, the inhibitors of TRAIL and/or DR5 are used to reduce, prevent and/or treat cytokine release syndrome (CRS) and neurological complications associated with the use of immune therapy and cell therapy, e.g., immune effector cell therapy, product. In an embodiment, the BiTE is Blinatumomab.

[0617] In another embodiment of the disclosure, the subject is administered a TRAIL antagonist to manage elevated levels of a soluble factor (e.g., cytokines) resulting from treatment with a cell therapy, e.g., immune effector cell, e.g., CAR-expressing cell. In an embodiment, the subject is administered a TRAIL antagonist to to manage elevated levels of a soluble factor (e.g., cytokines) resulting from treatment with a bispecific antibody (e.g., Blinatumomab or BCMA x CD3 bispecific antibody) that binds to immune effector cell. In an embodiment, the subject is administered a TRAIL antagonist to manage side effects (e.g. CRS and neurotoxicity) resulting from treatment with an immune effector cell (e.g., CAR-T cells or TCR-T cells or TILs) or a bispecific antibody (e.g., Blinatumomab) that binds to immune effector cell. In an embodiment, the subject is administered a TRAIL antagonist to manage elevated levels of a soluble factor (e.g., cytokines) resulting from treatment with a bispecific antibody that binds to immune effector cell. In an embodiment, the subject is administered a TRAIL antagonist to manage elevated levels of a soluble factor resulting from treatment with a TCR-expressing cell. In an embodiment, the subject is administered a TRAIL antagonist to to manage elevated levels of a soluble factor (e.g., cytokines) resulting from treatment with any immune effector cell.

[0618] An example of a TRAIL antagonist is a neutralizaing antibody against TRAIL e.g. MAB375-SP. In an embodiment, MAB375-SP is administered to a subject for the prevention or treatment of cytokine release syndrome and other toxicities, including neurotoxicity, resulting from administration of immune effector cell therapy (e.g., CAR-T, TCR-T, TILs, Blinatumomab, BCMA x CD3 BiTE etc.) at a dose of about 5 mg/kg (e.g. 5 mg/kg, 10 mg/kg, 20 mg/kg, 50 mg/kg, 100/kg mg) by subcutaneous or intravenous injection. In some embodiments, MAB375-SP is administered by intra-thecal or intra-ventricular injection to prevent or treat neurotoxicity associated with administration of cell therapy products. In some embodiment, the dose of MAB375-SP for intrathecal or intra-ventricular injection is about 20 mg (e.g., 20 mg, 50 mg, 100 mg) every week. In an embodiment, more than one dose of MAB375-SP is administered in case of no response to first dose. In an embodiment, MAB375-SP is administered about once every week, (e.g., once every week, twice every week, three times every week, once every two weeks, once every month etc.). In an embodiment, MAB375-SP is administered prophylactically, i.e., to prevent the development of CRS. In other embodiment, MAB375-SP is administered to treat CRS. In yet other embodiment, MAB375-SP is administered at the earliest signs and symptoms of CRS and/or neurotoxicity, such as fever >38.5° C., drop in systolic or diastolic blood pressure of more than 10 mm Hg, systolic blood pressure of <100 mm Hg or diastolic blood pressure of <70 mm Hg. In an embodiment, MAB375-SP is administered as a monotherapy. In other embodiments, MAB375-SP is administered in combination with other agents, e.g., corticosteroids, DR5-Fc, tocilizumab or anakinra.

[0619] Another example of a TRAIL antagonist is an antibody or a protein that binds to DR5 and prevent its binding to TRAIL. An example of a TRAIL antagonist is an antibody or a protein that binds to TRAIL and prevent or compete with its binding to DR5. An example of a protein that binds to TRAIL and compete with its binding to DR5 is DR5-Fc. In an embodiment, DR5-Fc is administered to a subject for the prevention or treatment of cytokine release syndrome and other toxicities, including neurotoxicity, resulting from administration of immune therapy, e.g., immune effector cell therapy (e.g., CAR-T, TCR-T, TILs, Blinatumomab, BCMA x CD3 BiTE etc.) at a dose of about 10 mg (e.g. 10 mg, 20 mg, 50 mg, 100 mg) by subcutaneous or intravenous injection. In an embodiment, DR5-Fc is administered about once weekly, (e.g., once weekly, twice weekly, or three times every week). In some embodiments, DR5-Fc is administered by intra-thecal or intra-ventricular injection to prevent or treat neurotoxicity associated with administration of cell therapy products. In some embodiment, the dose of DR5-Fc for intrathecal or intra-ventricular injection is about 20 mg (e.g., 20 mg, 50 mg, 100 mg) every week. In an embodiment, more than one dose of DR5-Fc is administered in case of no response to first dose. In an embodiment, DR5-Fc is administered as a monotherapy. In other embodiments, DR5-Fc is administered in combination with other agents, e.g., MAB375-SP, corticosteroids, tocilizumab or anakinra.

[0620] Other examples of proteins that bind to TRAIL and compete with its binding to DR5 are known in the art, e.g., DR4-Fc (SEQ ID NO: 2441), DcR1-Fc (SEQ ID NO: 2448), DcR2-Fc, DR5-ECD (SEQ ID NO: 2392), DR4-ECD (SEQ ID NO: 2386), DcR1-ECD (SEQ ID NO: 2375), and DcR2-ECD (SEQ ID NO: 2380) and can be used in alternate embodiments of the disclosure.

[0621] Provided in some aspects are methods of treatment including administering to a subject an agent, e.g., a TRAIL antagonist, e.g., DR5-Fc and/or MAB375-SP, capable of treating, preventing, delaying, or attenuating the development of a toxicity. In some cases, at the time of said administration, the subject has been previously administered a therapy, such as a therapy including an immunotherapy and/or a cell therapy. In some embodiments, the administration of the agent or other treatment is at a time that is less than or no more than ten, seven, six, five, four or three days after initiation of the administration of the therapy. In some of any such embodiments, the agent, e.g., a TRAIL antagonist, e.g., DR5-Fc and/or MAB375-SP or other treatment is administered at a time at which the subject exhibits grade 1 CRS or is administered within 24 hours after the subject exhibits a first sign or symptom of grade 1 CRS. In some cases, the agent or other treatment is administered at a time at which the subject exhibits a sign or symptom of CRS and/or exhibits grade 1 CRS. In some cases, the agent or other treatment is administered within 24 hours after the subject exhibits a first sign or symptom of grade 1 CRS following the initiation of administration of the therapy.

[0622] In some embodiments, a sign or symptom of grade 1 CRS is a fever. In some cases, the agent, e.g., a TRAIL antagonist, e.g., DR5-Fc and/or MAB375-SP or other treatment is administered within 24 hours after the first sign of a fever following initiation of administration of the therapy. In some aspects, the agent, e.g., a TRAIL antagonist, e.g., DR5-Fc and/or MAB375-SP or other treatment is administered within about 16 hours, within about 12 hours, within about 8 hours, within about 2 hours or within about 1 hour after the first sign of a fever following initiation of administration of the therapy.

[0623] In some embodiments, the fever is a sustained fever. In some cases, the fever is not reduced or not reduced by more than 1° C. after treatment with an antipyretic. In some aspects, the fever is a fever that is not reduced or not reduced by more than 1° C. after treatment with an antipyretic. In some instances, the fever has not been reduced by more than 1° C., following treatment of the subject with an antipyretic.

[0624] In some embodiments, the fever includes a temperature of at least or at least about 38.0° C. In some aspects, the fever includes a temperature that is between or between about 38.0° C. and 42.0° C., 38.0° C. and 39.0° C., 39.0° C. and 40.0° C. or 40.0° C. and 42.0° C., each inclusive. In some embodiments, the fever includes a temperature that is greater than or greater than about or is or is about 38.5° C., 39.0° C., 39.5° C., 40.0° C., 41.0° C., 42.0° C.

[0625] In some embodiments, the agent, e.g., a TRAIL antagonist, e.g., DR5-Fc and/or MAB375-SP or other treatment is administered less than five days after initiation of administration of the therapy, less than four days after initiation of administration of the therapy or less than three days after initiation of administration of the therapy.

[0626] In some embodiments, the therapy is or comprises a cell therapy. In some cases, the cell therapy is or comprises an adoptive cell therapy. In some aspects, the therapy is or comprises a tumor infiltrating lymphocytic (TIL) therapy, a transgenic TCR therapy or a recombinant receptor-expressing cell therapy, which optionally is a T cell therapy. In some embodiments, the therapy is a chimeric antigen receptor (CAR)-expressing T cell therapy. In some embodiments, the therapy is a bispecific/multispecific T cell engager therapy. In an exemplary embodiment, the therapy is Blinatumomab. In some embodiments, the therapy is a CD123×CD3 Bispecific antibody. In some embodiment, the therapy is a CD33×CD3 bispecific antibody therapy. In some embodiment, the therapy is a CD123×CD3 DART or a CD19×CD3 DART.

[0627] In some cases, the agent, e.g., a TRAIL antagonist, e.g., DR5-Fc and/or MAB375-SP is administered in combination with other treatment including a steroid, or an antagonist or inhibitor of a cytokine receptor or cytokine selected from among IL-10, IL-IOR, IL-6, IL-6 receptor, IFNγ, IFNGR, IL-2, IL-2R/CD25, MCP-1, CCR2, CCR4, MIPIP, CCR5, TNFalpha, TNFR1, IL-1, and IL-1Ralpha/IL-1beta.

[0628] In some aspects, a TRAIL antagonist is administered in combination with an agent selected from among an antibody or antigen-binding fragment, a small molecule, a protein or peptide and a nucleic acid. In some cases, the agent or other treatment is or comprises an agent selected from among tocilizumab, anakinra, situximab, sarilumab, olokizumab (CDP6038), elsilimomab, ALD518/BMS-945429, sirukumab (CNTO 136), CPSI-2634, ARGX-109, FE301 and FMl01.

[0629] In some embodiments, a TRAIL antagonist is administered in combination with tocilizumab. In some such embodiments, the tocilizumab is administered in a dosage amount of from or from about 1 mg/kg to 10 mg/kg, 2 mg/kg to 8 mg/kg, 2 mg/kg to 6 mg/kg, 2 mg/kg to 4 mg/kg or 6 mg/kg to 8 mg/kg, each inclusive, or the tocilizumab is administered in a dosage amount of at least or at least about or about 2 mg/kg, 4 mg/kg, 6 mg/kg or 8 mg/kg.

[0630] In some embodiments, a TRAIL antagonist is administered in combination with anakinra. In some such embodiments, the anakinra is administered in a dosage amount of from or from about 1 mg/kg to 10 mg/kg, 2 mg/kg to 8 mg/kg, 2 mg/kg to 6 mg/kg, 2 mg/kg to 4 mg/kg or 6 mg/kg to 8 mg/kg, each inclusive, or the anakinra is administered in a dosage amount of at least or at least about or about 2 mg/kg, 4 mg/kg, 6 mg/kg or 8 mg/kg.

[0631] In some aspects, the method further includes administering a steroid to the subject in combination with a TRAIL antagonist. In some such aspects, the steroid is administered at a time that is within 7 days, 8 days or 9 days after administration of the therapy. In some cases, the steroid is administered at a time that is within 24 hours after the first sign of hypotension following administration of the therapy. In some instances, the steroid is administered at a time in which the subject exhibits grade 2 cytokine release syndrome (CRS) or within 24 hours after the subject exhibits a first sign of grade 2 CRS following administration of the therapy. In some embodiments, the steroid is administered at a time in which the subject exhibits grade 2 neurotoxicity or within 24 hours after the subject exhibits a first sign or symptom of grade 2 neurotoxicity following administration of the therapy.

[0632] In some embodiments, the agent that is administered in combination with a TRAIL antagonist is or comprises a steroid that is or comprises a corticosteroid. In some aspects, the agent is a steroid that is or comprises a glucocorticoid. In some cases, the corticosteroid is or comprises dexamethasone or prednisone. In some cases, the steroid is administered intravenously or orally.

[0633] In some instances, the steroid is administered in an equivalent dosage amount of from or from about 1.0 mg to 20 mg dexamethasone per day, 1.0 mg to 10 mg dexamethasone per day, or 2.0 mg to 6.0 mg dexamethasone per day, each inclusive.

[0634] In some aspects, the TRAIL antagonist, e.g., MAB375-SP or DR5-Fc is administered within 24 hours after or contemporaneously with the first sign of hypotension following initiation of administration of the therapy. In some cases, the TRAIL antagonist, e.g., MAB375-SP or DR5-Fc is administered simultaneously with initiation of a pressor therapy. In some instances, hypotension includes systolic blood pressure less than or about less than 90 mm Hg, 80 mm Hg, or 70 mm Hg. In some instances, hypotension includes diastolic blood pressure less than 60 mm Hg, 50 mm Hg or 40 mm Hg.

[0635] In some embodiments, the therapy is or comprises a cell therapy and the cells are administered in a single pharmaceutical composition containing the cells. In some cases, the therapy is or comprises a cell therapy and the dose of cells is a split dose, wherein the cells of the dose are administered in a plurality of compositions, collectively containing the cells of the dose, over a period of no more than three days.

[0636] In some embodiments, the disease or condition for which a TRAIL antagonist is administered is or comprises a tumor or a cancer. In some embodiments, the therapy is a cell therapy including a dose of cells expressing a recombinant receptor. In some aspects, the recombinant receptor binds to, recognizes or targets an antigen associated with the disease or condition. In some cases, the recombinant receptor is a T cell receptor or a functional non-T cell receptor. In some instances, the recombinant receptor is a chimeric antigen receptor (CAR).

[0637] In some embodiments, the therapy is or comprises a therapy containing a dose of cells containing T cells. In some cases, the T cells are CD4+ or CD8+. In some embodiments, the T cells are autologous to the subject. In some embodiments, the T cells are allogeneic to the subject.

[0638] In some embodiments, the method further includes administering a chemotherapeutic agent prior to administering the therapy. In some instances, the subject has been previously treated with a chemotherapeutic agent prior to the initiation of administration of the therapy. In some aspects, the chemotherapeutic agent includes an agent selected from the group consisting of cyclophosphamide, fludarabine, and/or a combination thereof. In some embodiments, the chemotherapeutic agent is administered between 2 and 5 days prior to the initiation of administration of the therapy. In some cases, the chemotherapeutic agent is administered at a dose of between at or about 1 g/m2 of the subject and at or about 3 g/m2 of the subject.

[0639] In some embodiments, toxicity for which a TRAIL antagonist is administered is a neurotoxicity. In some embodiments, a CNS-related outcome in the subject at day up to or up to about day 7, 8, 9, 10, 11, 12, 13, 14, 15, 16, 17, 18, 19, 20, 21, 22, 23, 24, 25, 26, 27, 28, 29 or 30 following administration of the therapy, e.g., CAR-T therapy, is not detectable or is reduced as compared to a method including an alternative treatment regimen wherein the subject is administered the agent or other treatment after severe CRS or neurotoxicity has developed or after grade 2 or higher CRS or neurotoxicity has developed. In some embodiments, the toxic outcome is a symptom associated with grade 3 or higher neurotoxicity or is a symptom associated with grade 2 or higher CRS. In some embodiments, the toxic outcome is reduced by greater than 50%, 60%, 70%, 80%, 90% or more. In some cases, the toxic outcome is a symptom associated with grade 3 or higher neurotoxicity. In some embodiments, the toxic outcome is selected from among grade 3 or higher neurotoxicity include confusion, delirium, expressive aphasia, obtundation, myoclonus, lethargy, altered mental status, convulsions, seizure-like activity and seizures.

[0640] In some embodiments, the toxic outcome is grade 2 or higher CRS comprising one or more symptom selected from among persistent fever greater than at or about 38 degrees Celsius, for at least three consecutive days; hypotension requiring high dose vasopressor or multiple vasopressors; hypoxia, which optionally comprises (e.g., plasma oxygen (p02) levels of less than at or about 90% and respiratory failure requiring mechanical ventilation. In some embodiments, the therapy is a cell therapy comprising a dosage of cells and the cells exhibit increased or prolonged expansion and/or persistence in the subject as compared to administration of the cell therapy (in the subject or in a corresponding subject in an alternative cohort or treatment group) using alternative treatment regimen, wherein said alternative treatment regimen comprises administering the cell therapy and subsequently administering the agent or other treatment after severe CRS has developed or after grade 2 or higher CRS has developed, and optionally wherein the subject in said alternative treatment regimen is not administered said agent, and optionally is not administered any other treatment designed to treat CRS or neurotoxicity, following the administration of the cells and prior to said development of grade 2 or higher CRS or severe CRS. In some embodiments, the increase in or prolonging of expansion and/or persistence is by 2-fold, 3-fold, 4-fold, 5-fold, 6-fold, 7-fold, 8-fold, 9-fold or 10-fold.

[0641] In some embodiments, the therapy is a cell therapy comprising a dosage of cells and the cells exhibit increased or prolonged expansion and/or persistence in the subject as compared to the administration of the cell therapy (in the subject or a corresponding subject in an alternative cohort or treatment group) using alternative treatment regimen. In some cases, said alternative treatment regimen comprises administering the cell therapy and subsequently administering the agent or other treatment after severe CRS or neurotoxicity has developed or after grade 2 or higher CRS or neurotoxicity has developed. In some cases, the subject in said alternative treatment regimen is not administered said agent. In some instances, the subject in said alternative treatment regimen is not administered any other treatment designed to treat CRS or neurotoxicity, following the administration of the cells and prior to said development of grade 2 or higher CRS or severe CRS or grade 2 or higher neurotoxicity or severe neurotoxicity.

[0642] In some embodiments, the increase in or prolonging of expansion and/or persistence is by 2-fold, 3-fold, 4-fold, 5-fold, 6-fold, 7-fold, 8-fold, 9-fold or 10-fold.

[0643] In some embodiments, the therapy is a cell therapy, comprising engineered and/or CAR-expressing cells. In some cases, the concentration or number of the engineered and/or CAR-expressing cells in the blood of the subject at day 30, day 60, or day 90 following initiation of administration of the therapy is at least at or about 10 engineered or CAR-expressing cells per microliter, at least 50% of the total number of peripheral blood mononuclear cells (PBMCs), at least or at least about 1×10⁵ engineered or CAR-expressing cells, and/or at least 5,000 copies of CAR-encoding or engineered receptor-encoding DNA per micrograms DNA. In some embodiments, at day 30, 60, or 90 following the initiation of the administration of the therapy, the CAR-expressing and/or engineered cells are detectable in the blood or serum of the subject. In some instances, at day 30, 60, or 90 following the initiation of the administration of the therapy, the blood of the subject contains at least 20% CAR-expressing cells, at least 10 CAR-expressing cells per microliter or at least 1×10⁴ CAR-expressing cells. In some cases, at day 30, 60, or 90 following the initiation of the administration of the therapy, the blood of the subject contains at least 50%, 60%, 70%, 80%, or 90% of a biologically effective dose of the cells. In some embodiments, at day 30, 60, or 90 following the initiation of the administration of the therapy, the blood of the subject contains at least 20% engineered and/or CAR-expressing cells, at least 10 engineered and/or CAR-expressing cells per microliter and/or at least 1×10⁴ engineered and/or CAR-expressing cells. In some cases, at day 30, 60, or 90 following the initiation of the administration of the therapy, the subject exhibits a reduction or sustained reduction in burden of the disease or condition. In some cases, the reduction or sustained reduction in burden of the disease or condition is at or about or at least at or about 50, 60, 70, or 80% peak reduction following the therapy administration or reduction associated with effective dose.

[0644] In some embodiments, at day 30, 60 or 90 following the initiation of the administration of the therapy, the subject does not, and/or has not, following the cell therapy treatment, exhibited severe neurotoxicity, severe CRS, grade 2 or higher CRS, grade 2 or higher neurotoxicity, and/or has not exhibited seizures or other CNS outcome; or at day 30, 60, or 90 following the initiation of the administration of the therapy, less than or about less than 25%, less than or about less than 20%, less than or about less than 15%, or less than or about less than 10%) of the subjects so treated do not, and/or have not, following the cell therapy treatment, exhibited severe neurotoxicity, severe CRS, grade 2 or higher CRS, grade 2 or higher neurotoxicity, and/or have not exhibited seizures or other CNS outcome.

[0645] In some embodiments, the therapy is a cell therapy, comprising engineered and/or CAR-expressing cells; and the area under the curve (AUC) for blood concentration of engineered and/or CAR-expressing cells over time following the administration of the therapy is greater as compared to that achieved via a method comprising an alternative dosing regimen, such as where the subject is administered the therapy and is administered the agent or other treatment at a time at which the subject exhibits a severe or grade 2 or higher or grade 3 or higher CRS or neurotoxicity.

[0646] In some embodiments, also provided are agents, e.g., a TRAIL antagonist, e.g., DR5-Fc and/or MAB375-SP or other treatment for use in the treatment, prevention, delay or attenuation of the development of a toxicity in a subject that has been previously administered a therapy, which therapy comprises an immunotherapy and/or a cell therapy. In some embodiments, (a) the agents, e.g., TRAIL antagonists or other treatment are administered to a subject: (i) at a time that is less than or no more than ten, seven, six, five, four or three days after initiation of the subject having been administered the therapy; and/or (ii) at a time at which the subject does not exhibit a sign or symptom of severe cytokine release syndrome (CRS) and/or does not exhibit grade 2 or higher CRS; and/or (iii) at a time at which the subject does not exhibit a sign or symptom of severe neurotoxicity and/or does not exhibit grade 2 or higher neurotoxicity; and/or (b) between the time of initiation of the subject having been administered the therapy and the time of the administration of the agent or other treatment, (i) the subject has not exhibited severe CRS and/or has not exhibited grade 2 or higher CRS and/or (ii) the subject has not exhibited severe neurotoxicity and/or does not exhibit grade 2 or higher neurotoxicity.

[0647] In some embodiments, the agent, e.g., a TRAIL antagonist, e.g., DR5-Fc and/or MAB375-SP or other treatment is administered at a time at which the subject exhibits a sign or symptom of CRS and/or exhibits grade 1 CRS or is administered within 24 hours after the subject exhibits a first sign or symptom of grade 1 CRS following the administration of the therapy. In some embodiments, the sign or symptom of grade 1 CRS is a fever; and/or the agent or other treatment is administered within 24 hours after the first sign of a fever following administration of the therapy.

[0648] In some embodiments, also provided are agents, e.g., a TRAIL antagonist, e.g., DR5-Fc and/or MAB375-SP or other treatment use in the treatment, prevention, delay or attenuation of the development of a toxicity in a subject that has been previously administered a therapy, which therapy comprises an immunotherapy and/or a cell therapy, wherein the agent or other treatment is administered within 24 hours of the first sign of a fever following administration of the therapy.

[0649] In some embodiments, also provided are agents, e.g., a TRAIL antagonist, e.g., DR5-Fc and/or MAB375-SP or other treatment use in the treatment, prevention, delay or attenuation of the development of a toxicity in a subject that has been previously administered a therapy, which therapy comprises an immunotherapy and/or a cell therapy, wherein the agent or other treatment is administered within 24 hours of the first sign of a fever following administration of the therapy.

[0650] In some embodiments, also provided are agents, e.g., a TRAIL antagonist, e.g., DR5-Fc and/or MAB375-SP or other treatment for use as a medicament in treating, preventing, delaying, or attenuating the development of a toxicity in a subject that has been previously administered a therapy, which therapy comprises an immunotherapy and/or a cell therapy. In some embodiments, (a) the agent or other treatment is administered to a subject: (i) at a time that is less than or no more than ten, seven, six, five, four or three days after initiation of the subject having been administered the therapy; and/or (ii) at a time at which the subject does not exhibit a sign or symptom of severe cytokine release syndrome (CRS) and/or does not exhibit grade 2 or higher CRS; and/or (iii) at a time at which the subject does not exhibit a sign or symptom of severe neurotoxicity and/or does not exhibit grade 2 or higher neurotoxicity; and/or (b) between the time of initiation of the subject having been administered the therapy and the time of the administration of the agent or other treatment, (i) the subject has not exhibited severe CRS and/or has not exhibited grade 2 or higher CRS and/or (ii) the subject has not exhibited severe neurotoxicity and/or does not exhibit grade 2 or higher neurotoxicity.

[0651] In one embodiment, the subject can be administered an agent which alters the activity of cell therapy, e.g., an immune effector cell, e.g., CAR/TCR-expressing cell. In one embodiment, the subject can be administered an agent which enhances the activity of a bispecific antibody that binds to immune effector cell. For example, in one embodiment, the agent can be a TRAIL antagonist, e.g., a TRAIL antagonist described herein. In another embodiment, the agent can be an inhibitor of BRD9, EZH2, MLL2, MLL3, MLL4, methylcytosine dioxygenase genes (e.g., Tet1, Tet2, Tet3), ATM, CHEK, FBXW10, BCOR, FAT1, ASXL1, PHF6, SF3B1, YY1, CBFb, Runx1, EHMT2 (G9A), SMARCA4, CREBBP, PRDM1/BLIMP1, HDAC2, and/or DR5. In another embodiment, the agent can be an agent which inhibits an inhibitory molecule. Inhibitory molecules, e.g., Programmed Death 1 (PD-1), can, in some embodiments, decrease the ability of a CAR/TCR-expressing cell to mount an immune effector response. Examples of inhibitory molecules include PD-1, PD-Ll, CTLA-4, TIM-3, CEACAM (e.g., CEACAM-1, CEACAM-3 and/or CEACAM-5), LAG-3, VISTA, BTLA, TIGIT, LAIR1, CD160, 2B4 and TGF beta. Inhibition of an inhibitory molecule, e.g., by inhibition at the DNA, RNA or protein level, can optimize a CAR-expressing cell performance. In embodiments, an inhibitory nucleic acid, e.g., an inhibitory nucleic acid, e.g., a dsRNA, e.g., an siRNA or shRNA, a clustered regularly interspaced short palindromic repeats (CRISPR), a transcription-activator like effector nuclease (TALEN), or a zinc finger endonuclease (ZFN), e.g., as described herein, can be used to inhibit expression of an inhibitory molecule in the CAR-expressing cell. In an embodiment the inhibitor is an shRNA. In an embodiment, the inhibitory molecule is inhibited within a CAR/TCR-expressing cell. In these embodiments, a dsRNA molecule thatinhibits expression of the inhibitory molecule is linked to the nucleic acid that encodes a component, e.g., all of the components, of the CAR/TCR. In one embodiment, the inhibitor of an inhibitory signal can be, e.g., an antibody or antibody fragment that binds to an inhibitory molecule. For example, the agent can be an antibody or antibody fragment that binds to PD-1, PD-Ll, PD-L2 or CTLA4 (e.g., ipilimumab (also referred to as MDX-010 and MDX-101, and marketed as Yervoy@; Bristol-Myers Squibb; Tremelimumab (IgG2 monoclonal antibody available from Pfizer, formerly known as ticilimumab, CP-675,206).). In an embodiment, the agent is an antibody or antibody fragment that binds to TIM3. In an embodiment, the agent is an antibody or antibody fragment that binds to CEACAM (CEACAM-1, CEACAM-3, and/or CEACAM-5). In an embodiment, the agent is an antibody or antibody fragment that binds to LAG3.

[0652] The present disclosure also relates to methods for prevention and treatment of immune disorders, such as Rheumatoid Arthritis, Systemic-onsetjuvenile idiopathic arthritis, Still's disease, Macrophage activation syndrome, Hemophagocytic lymphohistiocytosis (HLH), systemic lupus erythematosus (SLE), Kawasaki disease, inflammatory bowel disease by interfering with and/or blocking the activity of TRAIL (TNFSF10) or its receptors, e.g., DR5. In particular, the present disclosure relates to methods for prevention and treatment of immune disorders caused by macrophage activation. In some embodiments, the present disclosure relates to methods for prevention and treatment of immune disorders caused by macrophage activation induced by T cells.

[0653] In an embodiment, the subject is administered a TRAIL antagonist, e.g. TRAIL antagonists described herein, to manage elevated levels of a soluble factor (e.g., cytokines) resulting from activation of macrophage and monocytes. In an embodiment, the subject is administered a TRAIL antagonist to manage elevated levels of a soluble factor (e.g., cytokines) resulting from activation of macrophages and monocytes by immune effector cells, e.g. T cells. An example of a TRAIL antagonist is a neutralizaing antibody against TRAIL e.g. MAB375-SP. In an embodiment, MAB375-SP is administered to a subject for the prevention or treatment of Rheumatoid Arthritis, Systemic-onset juvenile idiopathic arthritis, Still's disease, Macrophage activation syndrome, Hemophagocytic lymphohistiocytosis (HLH), systemic lupus erythematosus (SLE), Kawasaki disease, inflammatory bowel disease at a dose of about 5 mg/kg (e.g. 5 mg/kg, 10 mg/kg, 20 mg/kg, 50 mg/kg, 100/kg mg) by subcutaneous or intravenous injection. In some embodiments, MAB375-SP is administered by intra-thecal or intra-ventricular injection to prevent or treat neurotoxicity associated with immune disorders, e.g., macrophage activation syndrome. In some embodiment, the dose of MAB375-SP for intrathecal or intra-ventricular injection is about 20 mg (e.g., 20 mg, 50 mg, 100 mg) every week. In an embodiment, more than one dose of MAB375-SP is administered in case of no response to first dose. In an embodiment, MAB375-SP is administered about once every week, (e.g., once every week, twice every week, three times every week, once every two weeks, once every month etc.). In an embodiment, MAB375-SP is administered prophylactically, i.e., to prevent the flare of immune disorders. In other embodiment, MAB375-SP is administered to treat immune disorders, e.g., immune disorders described herein, e.g., Rheumatoid Arthritis, Systemic-onset juvenile idiopathic arthritis, Still's disease, Macrophage activation syndrome, Hemophagocytic lymphohistiocytosis (HLH), systemic lupus erythematosus (SLE), Kawasaki disease and inflammatory bowel disease. In yet other embodiment, MAB375-SP is administered at the earliest signs and symptoms of a flare of an immune disorder, such as fever >38.5° C., drop in systolic or diastolic blood pressure of more than 10 mm Hg, systolic blood pressure of <100 mm Hg or diastolic blood pressure of <70 mm Hg. In an embodiment, MAB375-SP is administered as a monotherapy. In other embodiments, MAB375-SP is administered in combination with other agents, e.g., corticosteroids, DR5-Fc, tocilizumab or anakinra. Another example of a TRAIL antagonist is an antibody or a protein that binds to DR5 and prevent its binding to TRAIL. An example of a TRAIL antagonist is an antibody or a protein that binds to TRAIL and prevent or compete with its binding to DR5. An example of a protein that binds to TRAIL and compete with its binding to DR5 is DR5-Fc. In an embodiment, DR5-Fc is administered to a subject for the prevention or treatment of an immune disorders, e.g., immune disorders described herein, e.g., Rheumatoid Arthritis, Systemic-onset juvenile idiopathic arthritis, Still's disease, Macrophage activation syndrome, Hemophagocytic lymphohistiocytosis (HLH), systemic lupus erythematosus (SLE), Kawasaki disease and inflammatory bowel disease at a dose of about 10 mg (e.g. 10 mg, 20 mg, 50 mg, 100 mg) by subcutaneous or intravenous injection. In an embodiment, DR5-Fc is administered about once weekly, (e.g., once weekly, twice weekly, or three times every week). In some embodiments, DR5-Fc is administered by intra-thecal or intra-ventricular injection to prevent or treat neurotoxicity associated with an immune disorder. In some embodiment, the dose of DR5-Fc for intrathecal or intra-ventricular injection is about 20 mg (e.g., 20 mg, 50 mg, 100 mg) every week. In some embodiments, DR5-Fc is administered by intra-articular injection. In an embodiment, more than one dose of DR5-Fc is administered in case of no response to first dose. In an embodiment, DR5-Fc is administered as a monotherapy. In other embodiments, DR5-Fc is administered in combination with other agents, e.g., MAB375-SP, corticosteroids, tocilizumab or anakinra. Other examples of proteins that bind to TRAIL and compete with its binding to DR5 are known in the art, e.g., DR4-Fc, DcR1-Fc, DcR2-Fc, and can be used in alternate embodiments of the disclosure. In some embodiments, a TRAIL antagonist is chosen from
[0654] i) A neutralizing antibody against TRAIL
[0655] ii) An antagonistic antibody against DR5 (TRAIL-R2)
[0656] iii) A competitive antagonist of DR5 (e.g., DR5-Fc)
[0657] iv) A protein capable of binding TRAIL and competes for its binding to DR5
[0658] v) A nucleic acid inhibitor of TRAIL and/or DR5
[0659] vi) A small molecule inhibitor of TRAIL and/or DR5
[0660] vii) A combination of the above

[0661] Pharmaceutical compositions of the disclosure may comprise a cell therapy product, e.g., CAR/TCR-expressing product, e.g., a plurality of CAR/TCR-expressing cells, as described herein, in combination with one or more pharmaceutically or physiologically acceptable carriers, diluents or excipients. Pharmaceutical compositions of the disclosure may comprise a small molecule inhibitor, a polypeptide inhibitor or a nucleic acid inhibitor of BRD9, EZH2, MLL2, MLL3, MLL4, methylcytosine dioxygenase genes (e.g., Tet1, Tet2, Tet3), ATM, CHEK, FBXW10, BCOR, FAT1, ASXL1, PHF6, SF3B1, YY1, CBFb, Runx1, EHMT2 (G9A), SMARCA4, CREBBP, PRDM1/BLIMP1, HDAC2, TRAIL (TNFSF10) and Death Receptor 5 (DR5 or TNFRSF10B).

[0662] Pharmaceutical compositions of the disclosure may comprise a bispecific or multispecific engager. Such compositions may comprise buffers such as neutral buffered saline, phosphate buffered saline and the like; carbohydrates such as glucose, mannose, sucrose or dextrans, mannitol; proteins; polypeptides or amino acids such as glycine; antioxidants; chelating agents such as EDTA or glutathione; adjuvants (e.g., aluminum hydroxide); and preservatives. Compositions of the disclosure are in one aspect formulated for intravenous administration.

[0663] Pharmaceutical compositions of the disclosure may be administered in a manner appropriate to the disease to be treated (or prevented). The quantity and frequency of administration will be determined by such factors as the condition of the patient, and the type and severity of the patient's disease, although appropriate dosages may be determined by clinical trials.

[0664] In one embodiment, the pharmaceutical composition is substantially free of, e.g., there are no detectable levels of a contaminant, e.g., selected from the group consisting of endotoxin, mycoplasma, replication competent lentivirus (RCL), p24, VSV-G nucleic acid, HIV gag, residual anti-CD3/anti-CD28 coated beads, mouse antibodies, pooled human serum, bovine serum albumin, bovine serum, culture media components, vector packaging cell or plasmid components, a bacterium and a fungus.

[0665] When “an immunologically effective amount,” “an anti-tumor effective amount,” “a tumor-inhibiting effective amount,” or “therapeutic amount” is indicated, the precise amount of the compositions of the disclosure to be administered can be determined by a physician with consideration of individual differences in age, weight, tumor size, extent of infection or metastasis, and condition of the patient (subject). It can generally be stated that a pharmaceutical composition comprising the immune effector cells (e.g., T cells, NK cells) described herein may be administered at a dosage of 10⁴ to 10⁹ cells/kg body weight, in some instances 10⁵ to 10⁶ cells/kg body weight, including all integer values within those ranges. T cell compositions may also be administered multiple times at these dosages. The cells can be administered by using infusion techniques that are commonly known in immunotherapy (see, e.g., Rosenberg et al., New Eng. J. of Med. 319:1676, 1988).

[0666] The administration of the subject compositions may be carried out in any convenient manner, including by aerosol inhalation, injection, ingestion, transfusion, implantation or transplantation. The compositions described herein may be administered to a patient trans arterially, subcutaneously, intradermally, intratumorally, intranodally, intramedullary, intramuscularly, by intravenous (i.v.) injection, or intraperitoneally.

[0667] In one aspect, the T cell compositions of the disclosure are administered by i.v. injection. The compositions of immune effector cells (e.g., T cells, NK cells) may be injected directly into a tumor, lymph node, or site of infection.

[0668] In aparticular exemplary aspect, subjects may receive a mobilization agent (e.g., a mobilization agent described herein, e.g., a CXCR4 antagonist) and then undergo leukapheresis, wherein leukocytes are collected, enriched, or depleted ex vivo to select and/or isolate the cells of interest, e.g., T cells. These T cell isolates may be expanded by methods known in the art or the methods described in this disclosure and treated such that one or more CAR/TCR constructs and accessory modules (e.g., constitutive active mutants of JAK3, STAT5 and/or inhibitor of BRD9 etc.) of the disclosure may be introduced, thereby creating a cell therapy product of the disclosure. The CAR/TCR cells may be activated and/or expanded in vitro using bispecific/multispecific engagers. Subjects in need thereof may subsequently undergo standard treatment with high dose chemotherapy followed by peripheral blood stem cell transplantation. In certain aspects, prior to, following or concurrent with the transplant, subjects receive an infusion of the expanded cell therapy product (e.g. CAR/TCR T cells) of the disclosure. In an additional aspect, expanded cells are administered before or following surgery. The subject may receive bispecific/multispecific engagers with or without costimulatory agents (e.g., 41BBL or Utomilumab) following administration of T cells to allow in vivo expansion of the administered cells. The subject may further receive a TRAIL antagonist to prevent, delay, attenuate or treat toxicitiy of infused cell therapy products.

[0669] The dosage of the above treatments to be administered to a patient will vary with the precise nature of the condition being treated and the recipient of the treatment. The scaling of dosages for human administration can be performed according to art-accepted practices.

[0670] In one embodiment, the CAR/TCR is introduced into immune effector cells (e.g., T cells, NK cells), e.g., using in vitro transcription, and the subject (e.g., human) receives an initial administration of CAR/TCR immune effector cells (e.g., T cells, NK cells) of the disclosure, and one or more subsequent administrations of the CAR/TCR immune effector cells (e.g., T cells, NK cells) of the disclosure, wherein the one or more subsequent administrations are administered less than 15 days, e.g., 14, 13, 12, 11, 10, 9, 8, 7, 6, 5, 4, 3, or 2 days after the previous administration. In one embodiment, more than one administration of the CAR/TCR immune effector cells (e.g., T cells, NK cells) of the disclosure are administered to the subject (e.g., human) per week, e.g., 2, 3, or 4 administrations of the CAR/TCR immune effector cells (e.g., T cells, NK cells) of the disclosure are administered per week. In one embodiment, the subject (e.g., human subject) receives more than one administration of the CAR/TCR immune effector cells (e.g., T cells, NK cells) per week (e.g., 2, 3 or 4 administrations per week) (also referred to herein as a cycle), followed by a week of no CAR/TCR immune effector cells (e.g., T cells, NK cells) administrations, and then one or more additional administration of the CAR/TCR immune effector cells (e.g., T cells, NK cells) (e.g., more than one administration of the CAR/TCR immune effector cells (e.g., T cells, NK cells) per week) is administered to the subject. In another embodiment, the subject (e.g., human subject) receives more than one cycle of CAR/TCR immune effector cells (e.g., T cells, NK cells), and the time between each cycle is less than 10, 9, 8, 7, 6, 5, 4, or 3 days. In one embodiment, the CAR/TCR immune effector cells (e.g., T cells, NK cells) are administered every other day for 3 administrations per week. In one embodiment, the CAR/TCR immune effector cells (e.g., T cells, NK cells) of the disclosure are administered for at least two, three, four, five, six, seven, eight or more weeks.

[0671] In one aspect, CAR/TCR-expressing cells of the disclosures are generated using lentiviral viral vectors, such as lentivirus. Cells, e.g., CAR/TCR Ts, generated that way will have stable-expression.

[0672] In one aspect, CAR/TCR-expressing cells, e.g., CARTs, are generated using a viral vector such as a gammaretroviral vector, e.g., a gammaretroviral vector described herein. CARTs generated using these vectors can have stable CAR expression.

[0673] In one aspect, CARTs transiently express CAR vectors for 4, 5, 6, 7, 8, 9, 10, 11, 12, 13, 14, 15 days after transduction. Transient expression of CARs/TCRs can be effected by RNA CAR vector delivery. In one aspect, the CAR/TCR RNA is transduced into the T cell by electroporation.

[0674] A potential issue that can arise in patients being treated using transiently expressing CAR immune effector cells (e.g., T cells, NK cells) (particularly with murine scFv bearing CARTs) is anaphylaxis after multiple treatments.

[0675] Without being bound by this theory, it is believed that such an anaphylactic response might be caused by a patient developing humoral anti-CAR response, i.e., anti-CAR antibodies having an anti-IgE isotype. It is thought that a patient's antibody producing cells undergo a class switch from IgG isotype (that does not cause anaphylaxis) to IgE isotype when there is a ten to fourteen day break in exposure to antigen.

[0676] If a patient is at high risk of generating an anti-CAR antibody response during the course of transient CAR therapy (such as those generated by RNA transductions), CART infusion breaks should not last more than ten to fourteen days.

### EXAMPLES

[0677] The disclosure is further described in detail by reference to the following experimental examples. These examples are provided for purposes of illustration only, and are not intended to be limiting unless otherwise specified. Thus, the disclosure should in no way be construed as being limited to the following examples, but rather, should be construed to encompass any and all variations which become evident as a result of the teaching provided herein.

[0678] Methods for generation and characterization of CAR-T cells, including generation of lentivirus and retroviruses, infection of T cells and PBMC, culture and expansion of T cells, in vitro assays for T cell function, such as ELISA, Flow cytometry, cell death assays (e.g., Matador assay), antigen detection assay (e.g., Topanga assay) and in vivo assays are known in the literature and have been described in WO 2018/102795 which is incorporated in its entirety by reference herein.

[0679] Generation of Lentiviruses and retroviruses. Lentiviruses were generated by calcium phosphate based transfection in 293FT cells essentially as described previously (Matta, Hozayev, Tomar, Chugh, & Chaudhary, 2003).

[0680] Infection of T cells and PBMC. Unless indicated otherwise, buffy coat cells were obtained from healthy de-identified adult donors from the Blood Bank at Children Hospital of Los Angeles and used to isolate peripheral blood mononuclear cells (PBMC) by Ficoll-Hypaque gradient centrifugation. PBMC were either used as such or used to isolate T cells using CD3 magnetic microbeads (Miltenyi Biotech) and following the manufacturer's instructions. PBMC or isolated T cells were re-suspended in XVIVO medium (Lonza) supplanted with 10 ng/ml CD3 antibody, 10 ng/ml CD28 antibody and 100 IU recombinant human-IL2. Alternatively, CD3/CD28 beads and 100 IU recombinant human-IL2 were used. Cells were cultured at 37° C., in a 5% CO₂ humidified incubator. Cells were activated in the above medium for 1 day prior to infection with lentiviral vectors. In general, primary cells (e.g. T cells) were infected in the morning using spin-infection (1800 rpm for 90 minutes at 37° C. with 300 μl of concentrated virus that had been re-suspended in XVIVO medium in the presence of 8 μg/ml of Polybrene® (Sigma, Catalog no. H9268). The media was changed in the evening and the infection was repeated on consecutive days for a total of 2-3 infections. After the last infection, the cells were pelleted and resuspended in fresh XVIVO media containing 10 ng/ml CD3 antibody, 10 ng/ml CD28 antibody and 100 IU recombinant human-IL2 and supplemented with respective antibiotics (if indicated) and placed in the cell culture flask for selection, unless indicated otherwise. Alternatively, CD3/CD28 beads and 100 IU recombinant human-IL2 were used. Cells were cultured in the above medium for 10-15 days in case no drug selection was used and for 20-30 days in case drug-selection was used. In cases, where cells were infected with a lentivirus expressing EGFP, they were expanded without drug-selection or flow-sorted to enrich for EGFP-expressing cells. For infection of cancer cell lines, approximately 500,000 cells were infected with 2 ml of the un-concentrated viral supernatant in a total volume of 3 ml with Polybrene® (Sigma, Catalog no. H9268). Then next morning, the cells were pelleted and resuspended in the media with respective antibiotics and place in the cell culture flask for selection.

[0681] Antibodies and drug. Digitonin was purchased from Sigma (Cat. no D141) and a stock solution of 100 mg/ml was made in DMSO. A diluted stock of 1 mg/ml was made in PBS. Final concentration of digitonin used for cell lysis was 30 μg/ml unless indicated otherwise.

[0682] Clinical Grade CAR-T Manufacturing and Administration

[0683] For clinical grade CAR-T manufacturing, cGMP grade lentiviruses encoding the CARs are generated using commercial sources (e.g., Lentigen, Lonza etc.). The T cell are collected from donors (autologous or allogeneic) using leukapheresis. CAR-T cells are manufactured using CLINIMAC Prodigy (Miltenyi Biotech) automated closed system as described (Zhu F, Shah N et al, Cytotherapy, 2017) and following the instructions of the manufacturer. The multiplicity of infection (MOI) of between 5 to 10 is used. Alternate methods for clinical grade CAR-T manufacturing, such as Cocoon (Lonza) and manual open systems, are known in the art and can be used in alternate embodiment of the invention. CAR-T cells are administered to the patient after lympho-depleting chemotherapy at escalating doses starting at approximately of 1×106 CD3 CAR-T cells/kg.

[0684] IL2 ELISA. Human IL2, IFNγ, IL6 and TNFα was measured in the cell culture supernatant of CAR-expressing Jurkat-NFAT-GFP effector cells or T cells that had been co-cultured with the specific target cell lines for 24 to 96 hours using ELISA kits from R&D systems (Minneapolis, Minn.) and following the recommendations of the manufacturer.

[0685] FACS analysis. Mouse Anti-Human c Myc APC conjugated Monoclonal Antibody (Catalog #IC3696A) was from R&D Systems (Minneapolis, Minn.). Biotinylated protein L was purchased from GeneScript (Piscataway, N.J.), reconstituted in phosphate buffered saline (PBS) at 1 mg/ml and stored at 4° C. Streptavidin-APC (SA1005) was purchased from ThermoFisher Scientific.

[0686] For detection of CARs using Myc staining, 1×10⁶ cells were harvested and washed three times with 3 ml of ice-cold 1×PBS containing 4% bovine serum albumin (BSA) wash buffer. After wash, cells were resuspended in 0.1 ml of the ice-cold wash buffer containing 10 μl of APC-conjugated Myc antibody and incubated in dark for 1 hour followed by two washings with ice cold wash buffer.

[0687] For detection of CARs using Protein L staining, 1×10⁶ cells were harvested and washed three times with 3 ml of ice-cold 1×PBS containing 4% bovine serum albumin (BSA) wash buffer. After wash, cells were resuspended in 0.1 ml of the ice-cold wash buffer containing 1 μg of protein L at 4° C. for 1 hour. Cells were washed three times with ice-cold wash buffer, and then incubated (in the dark) with 10 μl of APC-conjugated streptavidin in 0.1 ml of the wash buffer for 30 minutes followed by two washings with ice cold wash buffer. FACS was done using FACSVerse analyzer from BD Biosciences.

[0688] Cell death assay. To measure cell death, a novel assay based on ectopic cytosolic expression of Gluc, NLuc or LucPPe was utilized as described in PCT/US17/52344 “A Non-Radioactive Cytotoxicity Assay”.

[0689] Unless indicated otherwise, for measurement of LucPPe-146-1H2 activity, a 10× Luciferin stock solution was prepared consisting of 1 mM D-luciferin synthetic crystalline (Sigma), 25 mM glycylglycine, pH 7.8. A stock solution of luciferin assay buffer was prepared containing 25 mM glycylglycine, pH 7.8, 15 mM potassium phosphate, pH 7.8, 15 mM MgSO4, 4 mM EGTA, 2 mM ATP (Sigma). Working solution of Luciferase assay buffer for each 1.0 ml consisted of 885.5 μl assay buffer+1 μl DTT (1M stock)+100 μl of 10× Luciferin stock solution+13.5 μl ATP (100 mM stock). The assay buffer containing substrate was generally added to the media containing cells at 1:1 (v/v) ratio, unless indicated otherwise.

[0690] Cell lines engineered to express luciferases (e.g., GLuc, NLuc, LucPPe) for measuring cytotoxicity of different constructs targeting different cell surface and intracellular antigens using the Matador cytotoxicity assay are provided in Table A. Cell lines used in this experiments, target antigens on the cells lines and their growth media are shown in the following Table A. These cell lines can be also used as antigen presenting cells (APC) for activation/expansion of immune cells expressing CARs/TCRs targeting different antigens in the absence and presence of different bispecific/multispecific engagers of the disclosure. For example, CD19+ REC-1 cells can be used as APC for CARs targeting CD19. Alternatively, REC-1 cells can be used as APC for immune cells, e.g., T cells or Mesothelin CAR-T cells or NYESO-1-TCR-T cells, in the presence of Blinatumomab. Cells were cultured at 37° C., in a 5% CO₂ humidified incubator. The cell lines were obtained from ATCC, NIH AIDS reagent program or were available in the laboratory.

TABLE A

| Cell line | Culture Conditions | Exemplary CAR Target Antigens Expressed |
|---|---|---|
| BC-1 | RPMI, 20% FCS | BCMA, GPRC, CD138 |
| BC-3 | RPMI, 20% FCS | BCMA, GPRC, CD138 |
| BCBL-1 | RPMI, 20% FCS | GPRC, CD138 |
| JSC-1 | RPMI, 20% FCS | GPRC, CD138 |
| MM1S | RPMI, 10% FCS | CD38, GPRC, CD44, CD200R |
| U266 | RPMI, 10% FCS | BCMA, WT1/HLA-A2+, CS1, CLL1, CD138, |
| | | c-MET, IL6R, CD179b, NY-ESO/HLA-A2, |
| | | NYBR, LAMP1 |
| L363 | RPMI, 10% FCS | BCMA, GPRC, WT1/HLA-A2+, CS1, CLL1, |
| | | CD138, NY-ESO/HLA-A2, NYBR, LAMP1 |
| K562 | RPMI, 10% FCS | CD33, IL1Ra, TnAg |
| BV173 | RPMI, 10% FCS | CD123, CD179b, IL1Ra, WT1/HLA-A2+, |
| | | CXCR4, FLT3, CD179a |
| Nalm6 | RPMI, 10% FCS | CD19, CD20, CD22, CD179b, CD179a |
| HL60 | RPMI, 10% FCS | CD33, CD34, CLL1, IL6R, CD32, CD179 |
| U937 | RPMI, 10% FCS | CD4, CLL1 |
| RS: 411 | RPMI, 20% FCS | CD19, Folate Receptor beta (FRbeta), |
| | | TGFbeta, CD179b, NKG2D, FLT3, CD179a |
| MV: 411 | RPMI, 10% FCS | FLT3, CD123, FRbeta |
| Raji | RPMI, 10% FCS | CD19, CD20/MS4A1, CD22, BCMA, CD38, |
| | | CD70, CD79, Folate Receptor beta, CLL1 |
| HEL-92.1.7 | RPMI, 10% FCS | MPL, CD33, CD32, CD200R |
| (HEL) | | |
| Jurkat | RPMI, 10% FCS | TnAg, TSLRP, TSHR, CD4, CD38 |
| Daudi | RPMI, 10% FCS | BCMA, FRbeta |
| REC-1 | RPMI, 10% FCS | NKG2D, ROR1, CD19, CD20/MS4A1, CD22 |
| KG-1 | RPMI, 20% FCS | CD33, CD34, CD123, TSLRP |
| CEM | RPMI, 10% FCS | CD5, CD43 |
| U937 | RPMI, 10% FCS | CD4, CLL1 |
| LAMA5 | RPMI, 10% FCS | WT1/HLA-A2 |
| A549 | DMEM, 10% FCS | ROR1, CD22, TIM1, CDH17 |
| HT29 | DMEM, 10% FCS | EGFR, SLEA, c-MET |
| Molm-13 | RPMI, 20% FCS | FLT3, IL6R, LAMP1, TSLRP, CD4, |
| | | CSF2RA, CXCR4, IL6R, CSF2RA, GPC3 |
| A431 | DMEM, 10% FCS | EGFR, Folate Receptor Alpha, Her3 |
| P19 | DMEM, 10% FCS | SSEA |
| THP-1 | RPMI, 10% FCS | CD32, CD33, CXCR4, CD123, CD44, IL6R, |
| | | Folate Receptor beta, CD70, LAMP1, |
| | | FLT3, CSF2RA |
| U87MG | DMEM, 10% FCS | CD276, gpNMB, IL13RA2 |
| LoVo | DMEM, 10% FCS | Tissue Factor, CDH17, EGFR |
| SKOV-3 | DMEM, 10% FCS | Folate Receptor alpha (FR1), FSHR, |
| | | Her2, Her3, LHR, MSLN, TIM1, EPCAM |
| NCI-H1993 | DMEM, 10% FCS | EGFR |
| Kasumi-1 | RPMI, 20% FCS | CLEC5A, PR1/HLA-A2, TGFbeta, |
| Jeko-1 | RPMI, 20% FCS | BCMA, ROR1, CD20/MS4A1, CD22, CD19 |
| JVM-2 | RPMI, 20% FCS | BCMA, ROR1, CD20/MS4A1, CD22, CD19 |
| MINO | RPMI, 20% FCS | BCMA, CD20/MS4A1, CD19 |
| GRANTA-519 | RPMI, 20% FCS | CD20/MS4A1, CD22, CD19 |
| PC-3 | DMEM, 10% FCS | CGH, TROP2, PSCA, PSMA. EPCAM, FSHR, |
| | | CLD18A2 (CLDN18.2) |
| HeLa | DMEM, 10% FCS | EGFR, FR1, MSLN, TSHR |
| LnCap | DMEM, 10% FCS | EGFR, FSHR, PSCA, PSMA, CD22, Her3, |
| | | CD22, LHR, CLD18A2 (CLDN18.2) |
| OVCAR-3 | DMEM, 10% FCS | B7H4, CDH6, DLL3, FR1, FSH, LHR, MSLN, |
| | | PTK7, TnAg, TSHR, L1CAM |
| MEL-624 | DMEM, 10% FCS | CDH19, GD2, GD3, gp100/HLA-A2, gpNMB, |
| | | HMWMAA, NYESO/HLA-A2, MART1/HLA-A2 |
| LS174-T | DMEM, 10% FCS | CEA |
| MEL-526 | DMEM, 10% FCS | GD2 |
| MDA-MB231 | DMEM, 10% FCS | CD324, Muc1 |
| L1236 | RPMI, 20% FCS | CD30, CD23, PDL1 |
| L428 | RPMI, 20% FCS | CD30, CD123, CCR4, PDL1 |
| L540 | RPMI, 20% FCS | CD30, CCR4, PDL1 |
| Molt-16 | RPMI, 20% FCS | IL1ra, NKG2DNKG2D |
| CEM | RPMI, 10% FCS | CD5 |
| MG-63 | DMEM, 10% FCS | IL13RA2 |
| Karpass-299 | RPMI, 20% FCS | Alk, GPRC, PDL1 |
| MCF7 | DMEM, 10% FCS | B7D4, CD276, TROP2, Her3, Muc1, |
| | | LewisY, LHR |
| AA-2 | RPMI, 10% FCS | HIV1 env glycoprotein (gp120) |
| HL2/3 | DMEM, 10% FCS | HIV1 env glycoprotein (gpl20) |
| TF228.1.16 | DMEM, 10% FCS | HIV1 env glycoprotein (gp120), CCR4 |
| TT | DMEM, 10% FCS | TGF-Beta, TSHR, GFRalpha4 |
| DMS79 | RPMI, 10% FCS | Fucosyl-GM1, Slea (CA19.9; Sialyl |
| | | Lewis Antigen) |
| LAN-5 | DMEM, 10% FCS | ALK, DLL3, GFRalpha4, FUCOSYL-GM1 |
| PEER1 | RPMI, 10% FCS | TSHR |
| SK-MEL-37 | DMEM, 10% FCS | DLL3, GD2 |
| F9 | DMEM, 10% FCS | SSEA |
| HepG2 | DMEM, 10% FBS | GPC3, AFP/HLA-A2 |

[0691] Jurkat cell line (clone E6-1) engineered with a NFAT-dependent GFP reporter gene was a gift from Dr. Arthur Weiss at UCSF. Jurkat cells were maintained in RPMJ-1640 medium supplemented with 10% FBS, penicillin and streptomycin.

[0692] Guide RNA Molecules

[0693] gRNA molecules comprising the targeting sequences listed in Table 8 were used for the experiments described in this subexample. Unless otherwise indicated, all gRNA molecules were tested as dual gRNA molecules comprising the tracr and crRNA sequences described in this subexample.

TABLE 8

| | | gRNA Target |
|---|---|---|
| | Target | Sequence |
| TARGET GENE | Gene ID | SEQ ID NO: |
| BRD9 | 65980 | 1936-1939 |
| EZH2 | 2146 | 1940-1943 |
| KMT2D (MLL2) | 8085 | 1944-1947 |
| KMT2C (MLL3) | 58508 | 1948-1951 |
| KMT2B (MLL4) | 9757 | 1952-1955 |
| BRD8 | 10902 | 1956-1959 |
| CHEK2 | 11200 | 1960-1963 |
| TET1 | 80312 | 1964-1967 |
| TET2 | 54790 | 1968-1971 |
| TET3 | 200424 | 1972-1975 |
| ATM | 472 | 1976-1979 |
| FAT1 | 2195 | 1980-1983 |
| FBXW10 | 10517 | 1984-1987 |
| BCOR | 54880 | 1988-1991 |
| ASXL1 | 171023 | 1992-1995 |
| PHF6 | 84295 | 1996-1999 |
| KDM6A | 7403 | 2000-2003 |
| SF3B1 | 23451 | 2004-2007 |
| YY1 | 7528 | 2008-2011 |
| CBFB | 865 | 2012-2015 |
| Runx1 | 861 | 2016-2019 |
| PRDM1 (BLIMP1) | 639 | 2020-2023 |
| HDAC2 | 3066 | 2024-2027 |
| EHMT2 (G9A) | 10919 | 2028-2031 |
| SMARCA4 | 6597 | 2032-2035 |
| CREBBP | 1387 | 2036-2039 |
| TNFSF10 | 8743 | 2040-2043 |
| TNFRSF10A | 8797 | 2044-2047 |
| TNFRSF10B | 8795 | 2048-2051 |

[0694] Generation of CRISPR CAR T Cells

[0695] Isolated and frozen Pan T cells are thawed and activated with CD3/CD28 beads (CD3/CD28 CTS Dynabeads® 43205D) on day 0. Activated T cells are transduced with lentivirus encoding either a CD19 CAR (SEQ ID NO: 2822) or a CD20 CAR (SEQ ID NO: 2824) CAR) on day 1. On day 3, transduced CART cells are electroporated to introduce CRISPR/Cas systems in the form of pre-complexed gRNA/Cas9 ribonuclear protein (“RNP”). To form RNP, all RNA samples are heated at 95 C. S. pyogenes CAS9 Protein (NLS CAS9 iPROT106154, 37 μM) is diluted in buffer before tracrRNA (having the sequence AACAGCAUAGCAAGUUAAAAUAAGGCUAGUCCGUUAUCAACUUGAAAAAGUG GC ACCGAGUCGGUGUUUUUUU (SEQ ID NO: 2054); AXO Labs) is added to it. After mixing CAS9 Protein with tracrRNA, the CRISPR RNA is added (in each case, each crRNA comprised the sequence nnnnnnnnnnnnnnnnnnnnGUUUUAGAGCUAUGCUGUUUUG (SEQ ID NO: 2052), where the n residues represent the 20 ribonucleic acid residues of the indicated targeting sequence targeting the different genes shown in Table 8). The precomplexed RNPs are then added to a total of 1 million cells, RNP concentration is 3.2 μM. Electroporation is done by neon electroporator using Neon® Transfection System 100 μL Kit (MPKI0096) at 1600V, 10 ms, 3 pulses. The cells are kept in culture for 7 more days. Cells are then divided, with some used to perform flow cytometry: Staining for CAR (PE), and different markers, such as CD3 (PerCP-Cy5.5), CD4 (V450) and CD8 (APC), CD45RA, CCR7, CD62L. Remaining T cells are frozen and used for functional assays and next generation sequencing (NGS) sample generation. Other methods for gene editing of T cells using the CRISPR system are known in the art and can be used in alternate enablement of the disclosure (Osborn, M J et al, Molecular Therapy, 24; 3, 2016)

[0696] Alternatively, the double stranded oligonucleotides encoding the gRNAs targeting the different genes shown in Table 4a are cloned downstream of a U6 promoter in pLenti-CRISPR-v2 (SEQ ID NO: 359), which is available from Addgene and following the recommendations of the distributor (i.e. Addgene). The vector also encodes for S. pyogenes CAS9 Protein (Sp-NLS-Cas9). The lentiviruses are prepared by transfection of the gRNA encoding lentiviral vectors along with packaging vectors into 293FT cells as per the recommendations of the distributor (Addgene). Isolated and frozen Pan T cells were thawed and activated with CD3/CD28 beads (CD3/CD28 CTS Dynabeads@ 43205D) on day 0. Activated T cells were transduced with the lentiviruses encoding the different gRNA (or empty vector) and lentivirus encoding either a CD19 CAR (SEQ ID NO: 477) or a CD20 CAR (SEQ ID NO: 478) CAR) on day 1. The cells are kept in culture for 7 more days. Cells were then divided, with some used to perform flow cytometry: Staining for CAR (PE), and different markers, such as CD3 (PerCP-Cy5.5), CD4 (V450) and CD8 (APC), CD45RA, CCR7, CD62L. Remaining T cells are frozen and used for functional assays and next generation sequencing (NGS) sample generation.

[0697] Essentially a similar procedure is used to generate CRISPR T cells targeting the different genes and expressing TCR or next generation CARs (e.g., SIR, Ab-TCR, TFP etc.).

[0698] Generation of shRNA CAR T Cells

[0699] To generate shRNA encoding lentiviruses, the double stranded oligonucleotides encoding the shRNAs (SEQ ID NO: 274 to SEQ ID NO: 335) targeting the different genes shown in Table 5 are cloned downstream of U6 promoter in the lentivirus vector pLKO.1 (SEQ ID NO: 357) using standard molecular biology techniques. The lentiviruses are prepared after transfection of the shRNA encoding transfer vector into 293FT cells along with the packaging plasmids following the recommendations of the distributor (Addgene). Activated T cells are infected with the resulting viruses and expanded as describe above. In certain embodiments, the T cells are coinfected with shRNA encoding lentiviruses and CAR-encoding lentiviruses. In some experiments, T cells infected with shRNA encoded lentiviruses are selected with puromycin.

[0700] Generation of Lentiviral Expression Vectors Encoding Constitutive Active Mutants of JAK1, JAK3, Stat5b, Stat3, BRAF, IL2RG and CARD11.

[0701] cDNA encoding JAK1, JAK3, Stat5b, Stat3, BRAF, IL2RG and CARD11 are obtained from Sinobiological and are mutagenized using PCR-based Quick-Change protocol using custom primers. The mutant clones are confirmed by automated sequencing. The resulting clones serve as templates in PCR to amplify the coding sequence. The amplified PCR fragments are cloned in the lentiviral vector pLENTI-EFlu (SEQ ID NO: 337) or the retroviral vector MSCV-hygro (Clontech). The cDNA encoding the wild type and mutant forms of JAK1, JAK3, Stat5b, Stat3, BRAF, IL2RG and CARD11 are also cloned in lentiviral or retroviral vectors encoding CARs/TCRs and separated from them by 2A sequences.

[0702] T Cell Proliferation Assay

[0703] CART cell proliferation in response to target cells is evaluated. Target cell lines are listed in Table A. CAR-T cells are thawed incubated for 2 hours in T cell medium to recover. Cells are counted on a Cellometer. Target cells are irradiated at 10,000 rad. After irradiation, target cells are washed twice in complete T cell medium and counted. 30,000 Irradiated target cells are then co cultured with CART cells at 1:1 ratio. As a negative control, medium alone is added to CART cells.

[0704] The co-culture is incubated for 4 days at 37° C. On Day 4, coculture cells are stained for 20 mins on ice with CD3-percp cy5.5 (Ebioscience:45-0037), CD4-eflor450(Ebioscience:48-0047), and CD8-APC (Ebioscience 17-0087) and measured by flow cytometry relative to CountBright Absolute Counting Beads (Life Technologies) to determine relative cell counts.

[0705] CAR expression is measured by two step incubation of 20 mins each on ice: Biotinylated-Protein L+Streptavidin-PE (Jackson immuno research). Flow cytometry data is acquired using BD 5 laser Fortessa and analyzed by FlowJo software.

[0706] Bispecific Antibody Expression and Purification

[0707] DNA fragments encoding the bispecific antibiody sequences (SEQ ID NO: 2470-2645) are synthesized by IDT and clones in the pcDNA3.1 vector (ThermoFisher). The constructs are sequence confirmed using Automated Sanger Sequencing. Chinese hamster ovary (CHO) cells are transfected with the bispecific antibody expression vectors, and then cultured for 7 days for bispecific antibody production. CHO cell supernatants containing secreted bispecific antibody molecules are collected. Bispecific antibodies arre purified using HisTrap HP column (GE healthcare) by FPLC AKTA system. Briefly, CHO cell culture is clarified and loaded onto the column with low imidazole concentration (20 mM), and then an isocratic high imidazole concentration elution buffer (500 mM) is used to elute the bound bispecific proteins.

[0708] Generation and Characterization of CAR-T Cells from Perixafor Mobilized Cells

[0709] A patient with blood cancer was administered G-CSF (Neupogen) at dose of 10 μg/kg daily from days 1-5 by subcutaneous injection and Perixafor at a dose of 0.24 mg/kg subcutaneously daily on days 3-5. A leukapheresis product was collected from the patient 6 h after the last dose of Perixafor. The CD3+ T cells were isolated from the leukapheresis product using magnetic beads (Miltenyi Biotech) and following the manufacturer's instructions. T cells were re-suspended in XVIVO medium (Lonza) supplanted with 10 ng/ml CD3 antibody, 10 ng/ml CD28 antibody and 100 IU recombinant human-IL2. T cells were infected twice with three different lentiviral vectors encoding chimeric antigen receptors targeting CD19; a) FMC63-BBz-2A-PAC; b) FMC63-MYC-CD8TM-BBZ-T2A-eGFP and c) CD19-hu-mROO5-1-CD8TM-BBZ-T2A-eGFP using polybrene. The sequence of the CAR FMC63-BBz-2A-PAC is presented in SEQ ID NO: 478. This CAR construct is a 2nd generation CAR construct containing FMC63 scFv as the antigen binding domain, 4-1BB costimulatory domain and a CD3z activation domain. The construct also co-expresses a puromycin resistance gene (PAC) via a 2A cleavable linker. The CAR construct FMC63-MYC-CD8TM-BBZ-T2A-eGFP is similar in design to the construct FMC63-BBz-2A-PAC with the exception that the PAC gene is replace by EGFP (enhanced Green Fluorescent Protein). Finally, the construct CD19-hu-mROO5-1-CD8TM-BBZ-T2A-eGFP is similar in design to the construct FMC63-MYC-CD8TM-BBZ-T2A-eGFP with the exception that the FMC63 scFv is replaced by CD19-hu-mROO5 scFv, which also targets CD19. The CAR FMC63-BBz-2A-PAC was cloned in the pLENTI-EF1 vector (SEQ ID NO: 337), while the other two CARs were cloned in the pHAGE vector (Addgene Cat #24527). Following infection with the CAR constructs, the T cells were expanded in in XVIVO medium (Lonza) supplanted with 10 ng/ml CD3 antibody, 10 ng/ml CD28 antibody and 100 IU recombinant human-IL2. The cells transduced with the FMC63-BBz-2A-PAC CAR construct were also selected with puromycin for 12 days.

[0710] The T cells transduced with the CAR constructs FMC63-MYC-CD8TM-BBZ-T2A-eGFP and CD19-hu-mROO5-1-CD8TM-BBZ-T2A-eGFP were expanded without drug selection and monitored for transduction efficiency by flow cytometry. At day 8, approximately 37.2% and 42.8% of T cells infected with the the CAR constructs FMC63-MYC-CD8TM-BBZ-T2A-eGFP and CD19-hu-mROO5-1-CD8TM-BBZ-T2A-eGFP showed EGFP expression, respectively. At day 24, approximately 34.4% and 60.8% of T cells infected with the the CAR constructs FMC63-MYC-CD8TM-BBZ-T2A-eGFP and CD19-hu-mROO5-1-CD8TM-BBZ-T2A-eGFP showed EGFP expression, respectively. These results demonstrate that Perixafor mobilized cells can be used to generate CAR-T cells and these cells can be expanded in vitro without undergoing exhaustion.

[0711] To examine whether CAR-T cells generated from Perixafor mobilized cells are functionally active, after 10 days in culture, approximately 3×104 CAR-T cells or control T cells were co-cultured with equal number of RAJI or NALM6 cells stably expressing LucPPe-146-1H2 (LucPPe) in a 384 well plate in 60 μl of XVIVO medium in triplicate for 4 hours. Alternatively, cells were cultured at an E;T ratio of 10:1. Cellular toxicity was measured by addition of D-luciferin as described in PCT/US17/52344 “A Non-Radioactive Cytotoxicity Assay”. Treatment with Digitonin was used to measure maximum cell death. FIG. 1 shows effective induction of death of RAJI cells, as measured by increase in luminescence, by all three CAR constructs. Similarly, FIG. 2 shows effective induction of death of NALM6 cells, as measured by increase in luminescence, by all three CAR constructs. These results demonstrate that CAR-T cells can be generated from Perixafor mobilized blood cells and such cells demonstrate cytotoxicity against cells expressing their target antigen.

[0712] In a separate experiment, the supernatant from the co-culture experiment is collected after 24 hours and assayed for induction of cytokines. It is observed that co-culture of CAR-T cells with the RAJI cells results in increased production of IFNγ, TNFα and IL2 as compared to co-culture with parental T cells.

[0713] The CAR-T cells are analyzed for the expression of different markers (e.g., CD4, CD8, CD62L, P-glycoprotein, CD25, CD127 and FoxP3 etc.) by flow cytometry. No major increase in the proportion of TREGs (CD3+, CD4+, CD25high, CD127low, FoxP3+) cells is observed, suggesting that CAR-T cells can be generated from Perixafor mobilized blood cells without over-growth of TREGs. In addition, the proportion of CD4 and CD8 cells in the CAR-T cell product generated from Perixafor mobilized blood is similar to the proportion of CD4 and CD8 cells in the CAR-T cell product generated from non-mobilized cells.

[0714] To test the in vivo efficacy of the different CAR-T cells prepared from Perixafor mobilized blood, NSG mice are injected via tail vein with 0.5×10⁶ RAJI cells stably expressing firefly luciferase (RAJI-Luc) and three days later injected with 4×10⁶ T cells expressing the different CAR constructs. Animals are imaged weekly by bioluminescence imaging following injection of D-luciferin. There is significant tumor growth in animals given no T cells or control T cells and they all died. In contrast, animals given the CAR-T cells generated from Perixafor mobilized blood show improved survival.

[0715] Essentially similar results are obtained when the CAR-T cells are generated from blood cells that have been mobilized with treatment with Perixafor alone without treatment with G-CSF.

[0716] Generation and Characterization of CAR-T Cells from BL-8040, G-CSF, GM-CSF-Mobilized Cells

[0717] Leukapheresis products are collected from healthy subjects or subjects with different cancers who have been administered BL-8040 at a dose of 1 mg/kg subcutaneously for two days. The resulting leukapheresis cell product is used to isolate T cells and then used to generate CD19 SIR-T cells as described in the preceding example. CD19 SIR-T cells generated from BL-8040-mobilized blood are shown to expand in vitro, demonstrate effective cytotoxicity and cytokine production when exposed to their target cells in vitro and effective anti-cancer activity when tested in vivo using a RAJI xenograft model in immunodeficient mice. Essentially similar results are obtained when CAR-T or SIR-T cells are generated from leukapheresis products collected from healthy subjects or subjects with different cancers who have been administered G-CSF (10 μg/kg subcuteneously for 5 days) or GM-CSF (250 μg/m²/day s.c for 5 days).

[0718] Effect of Perixafor, BL-8040, G-CSF, GM-CSF-Mobilization on the Generation of Cell Therapy Products

[0719] A study is conducted to compare the generation of cell therapy products from cancer patients who have received 2 or more cycles of prior chemotherapy. Patients with different types of different cancers (e.g., diffuse large B cell lymphoma, acute B-ALL, CLL, multiple myeloma, breast cancer, ovarian cancer, lung cancer etc.) are eligible. Leukapheresis products are collected from the subjects with and without mobilization with Perixafor (0.24 mg/kg subcutaneously daily on days 1-3). T cells are isolated and used for manufacturing of CAR-T and TCR-T cells using lentiviral mediated gene transduction as described in the preceding sections. It is observed that mobilization with Perixafor improves the yield of T cells in the initial leukapheresis product and has no major adverse effect on a) gene transduction; b) expression of CAR/TCR; c) expansion of CAR-T/TCR-T products in vitro; d) cytotoxicity and cytokine production by the CAR-T/TCR-T cell products in vitro; e) expansion of CAR-T/TCR-T cell products in vivo; and f) anti-tumor efficacy of CAR-T/TCR-T cell products in vivo. Generation of CAR-T/TCR-T product from Perixafor-mobilized leukapheresis products is found to improve the total number of CAR-T/TCR-T cells obtained upon manufacturing, reduce manufacturing time and cost and reduce manufacturing failure. Similar results are obtained when other CXCR4 antagonists (e.g., BL-8040) is used for mobilization prior to leukapheresis. Finally, mobilization with G-CSF, GM-CSF is also found to improve the yield of leukapheresis product for generation of CAR-T cells.

[0720] Treatment of a Patient with Diffuse Large B Cell Lymphoma Using Perixafor Mobilized Immune Cells

[0721] A patient diffuse large B cell lymphoma receives Perixafor at a dose of 0.24 mg/kg subcutaneously daily for 3 days. A leukapheresis product is collected from a patient 6 h after the last dose of Perixafor. The leukapheresis product undergoes selection of CD3-positive T lymphocytes using the CliniMACS Prodigy® System from Miltenyi Biotec and following the manufacturer's recommendations. Cells are transduced with clinical grade lentivirus encoding a CD19-CAR (e.g., SEQ ID NO: 2822] and then selection and expansion of the CAR-T cells occurs in a closed system using the CliniMACS Prodigy@ System. After the resulting cell products have undergone quality control testing (including sterility and tumor specific cytotoxicity tests), they are cryopreserved. Meanwhile, following leukapheresis, the patient commences with lymphodepletive chemotherapy (30 mg/m²/day fludarabine plus 500 mg/m²/day cyclophosphamide x 3 days). One day after completion of their lymphodepleting regimen, the previously stored CAR-T cell product is transported, thawed and infused at the patient's bedside. The patient receives CAR-transduced lymphocytes infused intravenously. The dose of CAR-T product varies from 1×10⁴ CAR+ve CD3 cells/kg to 5×10⁸ CAR+ve CD3 cells/kg as per the study protocol. The CAR-T product may be administered in a single infusion or split infusions. The patient can be pre-medicated at least 30 minutes prior to T cell infusion with 15 mg/kg of acetaminophen P.O. (max. 650 mg.) and diphenhydramine 0.5-1 mg/kg I.V. (max dose 50 mg). The patient may optionally receive dailiy injections of human IL-2. Clinical and laboratory correlative follow-up studies are then be performed at the physician's discretion, and may include quantitative RT-PCR studies for the presence of CD19-expressing ALL/lymphoma cells and/or the adoptively transferred T cells; FDG-PET and/or CT scans; bone marrow examination for disease specific pathologic evaluation; lymph node biopsy; and/or long-term follow up per the guidelines set forth by the FDA's Biologic Response Modifiers Advisory Committee that apply to gene transfer studies. Essentially a similar approach can be used to treat other diseases using Perixafor-mobilized immune cells (e.g., T cells) that have been engineered to express the CAR where the CAR targets an antigen or antigens expressed on the disease causing or disease-associated cells.

[0722] Treatment of a Patient with Ovarian Cancer Using Perixafor and Chemotherapy Mobilized Immune Cells

[0723] A patient ovarian cancer receives chemotherapy with cyclophosphamide (4 gm/m²) plus etoposide (600 mg/m²). One day after completion of chemotherapy, patient receives an injection of Pegfilgastrim (12 mg) subcutaneously. When the absolute neutrophil count reaches more than 500/mm³, patient receives Perixafor at a dose of 0.24 mg/kg subcutaneously daily for 3 days. A leukapheresis product is collected from a patient 6 h after the last dose of Perixafor. The leukapheresis product undergoes selection of CD3-positive T lymphocytes using the CliniMACS Prodigy® System from Miltenyi Biotec and following the manufacturer's recommendations. Optionally, T regulatory cells (CD3+, CD4+, CD25^{high}, CD127^{low}, FoxP3+) are removed by depletion of CD25-positive T cells. Cells are transduced with clinical grade lentivirus encoding a FR1-CAR (e.g., SEQ ID NO:

[0724] and then selection and expansion of the CAR-T cells occurs in a closed system. After the resulting cell products passes quality control testing (including sterility and tumor specific cytotoxicity tests), they are cryopreserved. Meanwhile, following leukapheresis, the patient commences with lymphodepletive chemotherapy (30 mg/m²/day fludarabine plus 500 mg/m²/day cyclophosphamide x 3 days). One day after completion of their lymphodepleting regimen, the previously stored CAR-T cell product is transported, thawed and infused at the patient's bedside. The patient receives CAR-transduced lymphocytes infused intravenously. The dose of CAR-T product varies from 1×10⁴ CAR+ve CD3 cells/kg to 5×10⁸ CAR+ve CD3 cells/kg as per the study protocol. The CAR-T product may be administered in a single infusion or split infusions. The patient can be pre-medicated at least 30 minutes prior to T cell infusion. The patient may optionally receive dailiy injections of human IL-2. Clinical and laboratory correlative follow-up studies are then be performed at the physician's discretion. Essentially a similar approach can be used to treat other diseases using chemotherapy and Perixafor-mobilized immune cells (e.g., T cells) that have been engineered to express the CAR or TCR where the CAR or the TCR targets an antigen or antigens expressed on the disease causing or disease-associated cells.

[0725] Use of G-CSF and Perixafor to Mobilize Immune Prior to Leukapheresis for Manufacturing of Cell Therapy Products.

[0726] A healthy donor receives G-CSF (Neupogen) at dose of 10 μg/kg daily from days 1-5 by subcutaneous injection and Perixafor at a dose of 0.24 mg/kg subcutaneously daily on days 3-5. A leukapheresis product is collected from a donor 6 h after the last dose of Perixafor. The CD3 cells are isolated from the leukapheresis product using magnetic beads. A Mesothelin-targeted chimeric antigen receptor (e.g. SEQ ID NO: 2832) is targeted to the TCR alpha (TRAC) locus according to methods known in the art. The Mesothelin-CAR-T cells expressing TCRa-deficient T cells are purified, expanded using CD3/CD28 beads using methods known in the art. An aliquote of Mesothelin-CAR-T cells is tested for cytotoxicity against SKOV3-GLuc cells using Matador asaay and is shown to exert robust cytotoxicity as compared to control CAR-T cells. Another aliquote Mesothelin-CAR-T cells (5×10⁵ CAR-T cells/mice) is tested for in vivo activity using a xenograft model of SKOV3 cells (1×10⁵ cells by subcutaneous injection) in NSG mice using methods known in the art and is shown to reduce tumor growth and prolong survival as compared to mice given control CAR-T cells. Another aliquote of Mesothelin-CAR-T cells (5×10⁸ CAR-T cells) is administered to a patient with Mesothelin-expressing mesothelioma by intravenous infusion using methods known in the art.

[0727] Use of Beta2 Adrenergic Agonists or Exercise to Mobilize Immune Prior to Leukapheresis for Manufacturing of Cell Therapy Products.

[0728] A leukapheresis product is collected from a patient with metastatic ovarian cancer expressing Mesothelin after the patient has received epinephrine intravenous infusion at 0.005 mg/kg/min for about 30 minutes. In an alternate embodiment, the patient performs moderate exercise on a treadmill for 30 minutes to increase the heart rate to above 150 beats/minute. Selection of CD3-positive T lymphocytes is performed using the CliniMACS Prodigy® System from Miltenyi Biotec and following the manufacturer's recommendations. Approximately 10⁸ to 10⁸ T cells are transduced with a lentiviral encoding a Mesothlin CAR (SEQ ID NO: 2831). The CAR-T cells are expanded for 14-21 days in a closed system using CD3/CD28 beads. The resulting cell products undergoes quality control testing (including sterility and tumor specific cytotoxicity tests). The CAR-T cell product is administered to the patient by intravenous infusion. The dose of CAR-T product varies from 1×10⁴ CAR+ve CD3 cells/kg to 5×10⁹ CAR+ve CD3 cells/kg.

[0729] Use of BL-8040 to Mobilize Immune Prior to Leukapheresis for Manufacturing of Cell Therapy Products.

[0730] A leukapheresis product is collected from ahealthy volunteer after administration of 1 mg/kg BL-8040 subcutaneoulsy for 2 days. Selection of CD3-positive T lymphocytes is performed using the CliniMACS Prodigy@ System from Miltenyi Biotec and following the manufacturer's recommendations. Approximately 10⁸ to 10⁸ T cells are transduced with a lentiviral encoding a CD19 CAR (SEQ ID NO:478). The CAR-T cells are expanded for 14-21 days in a closed system using CD3/CD28 beads. The resulting CAR-T cell product passes quality control testing (e.g., sterility, yield, tumor specific cytotoxicity tests, antigen induced cytokine production, immunophenotype etc.) and is cryopreserved in aliquotes. An aliquote of CAR-T cell product is thawed and administered to the patient with CD19+ ALL by intravenous infusion. The dose of CAR-T product varies from 1×10⁴ CAR+ve CD3 cells/kg to 5×10⁹ CAR+ve CD3 cells/kg. Essentially a similar approach is used to manufacture an autologous CAR-T cell product from BL-8040 mobilized immune cells.

[0731] Effect of EZH2 Inhibitors Tazemetostat (EPZ6438, Cat No S7128, Cayman Chemicals) and GSK343 (Cat No. S7164 Cayman Chemicals) to Generate T Stem Cells for Adoptive Immunotherapy Showing Surface Expression of CD45RA+CD62L+CCR7+

[0732] The use of P-glycoprotein (Pgp)-mediated efflux of DiOC2(3) to isolate stem like T cells for adoptive cellular therapy has been described in application no. PCT/US2017/042248. In the following examples, DiOC2(3) staining was used to study the effect of different inhibitors on generation of stem like T cells.

DAY 0: Blood was obtained from unidentified donor. After RBC lysis, PBMC were collected using Ficoll-Hypaque separation. 208 million T cells were isolated from 440 million PBMCs using CD3 microbeads (cat. No. 130-050-101) from Miltenyi. T cells were cultured in three different conditions:
[0733] 1. XVIVO 15 medium (Lonza) with IL2 50 IU/ml, CD3 antibody (30 ng/ml) and CD28 antibody (30 ng/ml).
[0734] 2. XVIVO 15 medium (Lonza) with CD3 antibody (30 ng/ml) and CD28 antibody (30 ng/ml).
[0735] 3. XVIVO 15 medium (Lonza) with IL2 50 IU/ml
   DAY 1: Cells were plated in a 6-well plate at a density of 1 million cells in 2 ml/of media (as described above) and treated with different inhibitors

[0736] Cells were cultured for 6 days and an aliquot of cells with all the treatments listed above (1-21) was used to stain the cells with DiOC2(3) (60 ng/ml in RPMI medium) at 4° C. for 40 min, washed with RPMI medium, DiOC2(3) dye was effluxed at 37° C. for 90 min, washed with PBS+1% FBS, stained with CD62L-APC antibdoy (5 μl/100 μl/sample) at 4° C. for 1 h, washed twice with PBS+1% FBS and analyzed on flow cytometer to check if these drugs are affecting the dye-effluxing or Pgp+ T cell population which are enriched for T stem cells and are better suited for adoptive cellular therapy, e.g., for manufacturing of CAR-T or TCR-T cell therapy products.

[0737] The cell growth medium was changed in 6-well plates and fresh drugs were added at same concentration for one more week.

[0738] The effect of different tested inhibitors on the percentage of the Pgp+ and CD62L+ T cell population is shown below in Table 9 and Table 10. Most inhibitors increased the percentage of Pgp+ and CD62L+ stem like T cells when added to the culture containing treatment with CD3 antibody, CD28 antibdy and L2. For example, the perecentage ofPgp+ cells increased from 19.800 cells in culture containing treatment with CD3-CD28-IL2 to 27.17 in culture containing treatment with CD3, CD28, L2 and Tazemetostat (10 nM) and 30.62% in culture containing CD3, CD28, L2 and GSK343 (500 nM). Similarly, the perecentage of Pgp+CD62L+ cells increased from 6.57% cells in culture containing treatment with CD3-CD28-IL2 to 13.168 in culture containing treatment with CD3, CD28, L2 and Tazemetostat (100 nM) and 13.33% in culture containing CD3, CD28, L2 and GSK343 (500 nM).

TABLE 9
Table 9: Percentage of Pgp+ (DiOC2 (3)-dye effluxing cells)
T cells are increased after 6 days of treatment with EZH2-inhibitors.

| S. | | % of Pgp+ cells |
|---|---|---|
| No. | Treatment | out of live cells |
| 1 | CD3-CD28-IL2 | 19.89 |
| 2 | CD3-CD28 | 35.34 |
| 3 | CD3-IL2 | 18.41 |
| 4 | CD3-CD28-IL2-Tazemetostat 10 nM | 21.86 |
| 5 | CD3-CD28-IL2-Tazemetostat 100 nM | 27.17 |
| 6 | CD3-CD28-IL2-Tazemetostat 200 nM | 24.85 |
| 7 | CD3-CD28-IL2-GSK343 100 nM | 23.29 |
| 8 | CD3-CD28-IL2-GSK343 500 nM | 30.62 |
| 9 | CD3-CD28-IL2-GSK343 1 μM | 28.03 |
| 10 | CD3-CD28-Tazemetostat 10 nM | 39.28 |
| 11 | CD3-CD28-Tazemetostat 100 nM | 40.50 |
| 12 | CD3-CD28-Tazemetostat 200 nM | 43.11 |
| 13 | CD3-CD28-GSK343 100 nM | 48.43 |
| 14 | CD3-CD28-GSK343 500 nM | 47.09 |
| 15 | CD3-CD28-GSK343 1 μM | 46.26 |
| 16 | CD3-IL2-Tazemetostat 10 nM | 24.77 |
| 17 | CD3-IL2-Tazemetostat 100 nM | 25.31 |
| 18 | CD3-IL2-Tazemetostat 200 nM | 25.89 |
| 19 | CD3-IL2-GSK343 100 nM | 25.49 |
| 20 | CD3-IL2-GSK343 500 nM | 25.21 |
| 21 | CD3-IL2-GSK343 1 μM | 28.31 |

TABLE 10
Table 10: Percentage of Pgp+ (DiOC2(3)-dye effluxing
cells) and CD62L+ T cells are increased after 6
days treatment with EZH2-inhibitors

| S. | | % of Pgp+ CD62L+cells |
|---|---|---|
| No. | Treatment | out of live cells |
| 1 | CD3-CD28-IL2 | 6.57 |
| 2 | CD3-CD28 | 15.66 |
| 3 | CD3-IL2 | 4.29 |
| 4 | CD3-CD28-IL2-Tazemetostat 10 nM | 8.42 |
| 5 | CD3-CD28-IL2-Tazemetostat 100 nM | 13.16 |
| 6 | CD3-CD28-IL2-Tazemetostat 200 nM | 11.30 |
| 7 | CD3-CD28-IL2-GSK343 100 nM | 8.57 |
| 8 | CD3-CD28-IL2-GSK343 500 nM | 13.33 |
| 9 | CD3-CD28-IL2-GSK343 1 μM | 12.05 |
| 10 | CD3-CD28-Tazemetostat 10 nM | 19.36 |
| 11 | CD3-CD28-Tazemetostat 100 nM | 18.38 |
| 12 | CD3-CD28-Tazemetostat 200 nM | 20.94 |
| 13 | CD3-CD28-GSK343 100 nM | 23.35 |
| 14 | CD3-CD28-GSK343 500 nM | 24.79 |
| 15 | CD3-CD28-GSK343 1 μM | 23.41 |
| 16 | CD3-IL2-Tazemetostat 10 nM | 8.76 |
| 17 | CD3-IL2-Tazemetostat 100 nM | 10.11 |
| 18 | CD3-IL2-Tazemetostat 200 nM | 11.97 |
| 19 | CD3-IL2-GSK343 100 nM | 8.62 |
| 20 | CD3-IL2-GSK343 500 nM | 9.32 |
| 21 | CD3-IL2-GSK343 1 μM | 10.99 |

[0739] O11618 (DAY 11): Culture medium was changed and fresh drugs were added in 6-well plates.

[0740] O11818 (DAY 13): One aliquot of the cells that had been cultured for 13 days with all the treatments listed above (1-21) were used to stain the cells with DiOC2(3) (60 ng/ml in RPMI medium) at 4° C. for 40 min. Subsequently, cells were washed with RPMI medium and dye was effluxed at 37° C. for 90 min. Cells were washed with PBS+100 FBS, stained with CD62L-APC (5 μl/100 μl/sample) at 4° C. for 1 h, washed twice with PBS+1% FBS and analyzed on flow cytometer to check if these drugs treatment leads to increase in Pgp+/CD62L positive population.

TABLE 11
Table 11: Percentage of Pgp+ (DIOC2-dye effluxing cells) T
cells are increased after 13 days of treatment with EZH2-inhibitors.

| S. | | % of Pgp+ cells |
|---|---|---|
| No. | Treatment | out of live cells |
| 1 | CD3-CD28-IL2 | 25.55 |
| 2 | CD3-CD28 | 10.22 |
| 3 | CD3-IL2 | 17.85 |
| 4 | CD3-CD28-IL2-Tazemetostat 10 nM | 30.38 |
| 5 | CD3-CD28-IL2-Tazemetostat 100 nM | 38.45 |
| 6 | CD3-CD28-IL2-Tazemetostat 200 nM | 41.22 |
| 7 | CD3-CD28-IL2-GSK343 100 nM | 27.15 |
| 8 | CD3-CD28-IL2-GSK343 500 nM | 18.00 |
| 9 | CD3-CD28-IL2-GSK343 1 μM | 23.42 |
| 10 | CD3-CD28-Tazemetostat 10 nM | 12.41 |
| 11 | CD3-CD28-Tazemetostat 100 nM | 5.19 |
| 12 | CD3-CD28-Tazemetostat 200 nM | 11.82 |
| 13 | CD3-CD28-GSK343 100 nM | 11.66 |
| 14 | CD3-CD28-GSK343 500 nM | 10.34 |
| 15 | CD3-CD28-GSK343 1 μM | 9.43 |
| 16 | CD3-IL2-Tazemetostat 10 nM | 28.61 |
| 17 | CD3-IL2-Tazemetostat 100 nM | 16.74 |
| 18 | CD3-IL2-Tazemetostat 200 nM | 28.06 |
| 19 | CD3-IL2-GSK343 100 nM | 20.31 |
| 20 | CD3-IL2-GSK343 500 nM | 23.54 |
| 21 | CD3-IL2-GSK343 1 μM | 17.50 |

TABLE 12
Table 12: percentage of Pgp+ (DiOC2(3)-dye effluxing
cells) and CD62L+ T cells are increased with 13
days treatment with EZH2-inhibitors

| S. | | % of Pgp+ CD62L+cells |
|---|---|---|
| No. | Treatment | out of live cells |
| 1 | CD3-CD28-IL2 | 6.41 |
| 2 | CD3-CD28 | 2.09 |
| 3 | CD3-IL2 | 4.70 |
| 4 | CD3-CD28-IL2-Tazemetostat 10 nM | 8.03 |
| 5 | CD3-CD28-IL2-Tazemetostat 100 nM | 12.57 |
| 6 | CD3-CD28-IL2-Tazemetostat 200 nM | 14.25 |
| 7 | CD3-CD28-IL2-GSK343 100 nM | 7.96 |
| 8 | CD3-CD28-IL2-GSK343 500 nM | 4.79 |
| 9 | CD3-CD28-IL2-GSK343 1 μM | 5.75 |
| 10 | CD3-CD28-Tazemetostat 10 nM | 2.95 |
| 11 | CD3-CD28-Tazemetostat 100 nM | 1.18 |
| 12 | CD3-CD28-Tazemetostat 200 nM | 2.66 |
| 13 | CD3-CD28-GSK343 100 nM | 2.50 |
| 14 | CD3-CD28-GSK343 500 nM | 2.12 |
| 15 | CD3-CD28-GSK343 1 μM | 2.28 |
| 16 | CD3-IL2-Tazemetostat 10 nM | 9.87 |
| 17 | CD3-IL2-Tazemetostat 100 nM | 4.31 |
| 18 | CD3-IL2-Tazemetostat 200 nM | 9.08 |
| 19 | CD3-IL2-GSK343 100 nM | 5.24 |
| 20 | CD3-IL2-GSK343 500 nM | 6.82 |
| 21 | CD3-IL2-GSK343 1 μM | 5.17 |

[0741] A second aliquot of the cells cultured for 13 days with all the treatments listed above (1-21) was washed with PBS+1% FBS, stained with CD8-PerCP, CD45RA-FITC, CCR7-PE and CD62L-APC (5% Y/100 μl/sample for each of 4 antibodies) at 4° C. for 1 h, washed twice with PBS+100 FBS and analyzed on flow cytometer to check if these drugs are enriching T stem cells showing surface expression of CD8+CD45RA+CCR7+CD62L+.

TABLE 13
Table 13: percentage of CD8+CD45RA+CCR7+CD62L+ T cells are
increased with 13 days of treatment with EZH2-inhibitors

| | | % of CD62L+CCR7+ |
|---|---|---|
| | | double positive cells |
| S. | | out of CD45RA+ cells in |
| No. | Treatment | CD8+ T cell population |
| 1 | CD3-CD28-IL2 | 60.01 |
| 2 | CD3-CD28 | 65.86 |
| 3 | CD3-IL2 | 58.84 |
| 4 | CD3-CD28-IL2-Tazemetostat 10 nM | 62.73 |
| 5 | CD3-CD28-IL2-Tazemetostat 100 nM | 83.53 |
| 6 | CD3-CD28-IL2-Tazemetostat 200 nM | 80.78 |
| 7 | CD3-CD28-IL2-GSK343 100 nM | 82.96 |
| 8 | CD3-CD28-IL2-GSK343 500 nM | 82.42 |
| 9 | CD3-CD28-IL2-GSK343 1 μM | 85.00 |
| 10 | CD3-CD28-Tazemetostat 10 nM | 87.00 |
| 11 | CD3-CD28-Tazemetostat 100 nM | 88.26 |
| 12 | CD3-CD28-Tazemetostat 200 nM | 88.37 |
| 13 | CD3-CD28-GSK343 100 nM | 85.28 |
| 14 | CD3-CD28-GSK343 500 nM | 80.34 |
| 15 | CD3-CD28-GSK343 1 μM | 85.70 |
| 16 | CD3-IL2-Tazemetostat 10 nM | 82.23 |
| 17 | CD3-IL2-Tazemetostat 100 nM | 79.86 |
| 18 | CD3-IL2-Tazemetostat 200 nM | 77.35 |
| 19 | CD3-IL2-GSK343 100 nM | 73.95 |
| 20 | CD3-IL2-GSK343 500 nM | 77.29 |
| 21 | CD3-IL2-GSK343 1 μM | 81.47 |

TABLE 14
percentage of CD45RA+CCR7+CD62L+ T
cells (all T cells not only CD8+ or CD8−) are
increased after 13 days treatment with EZH2-inhibitors

| | | % of CD62L+CCR7+ |
|---|---|---|
| | | double positive cells |
| S. | | out of CD45RA+ cells in |
| No. | Treatment | live T cell population |
| 1 | CD3-CD28-IL2-UT | 51.86 |
| 2 | CD3-CD28-UT | 60.55 |
| 3 | CD3-IL2-UT | 50.51 |
| 4 | CD3-CD28-IL2-Tazemetostat 10 nM | 50.85 |
| 5 | CD3-CD28-IL2-Tazemetostat 100 nM | 67.51 |
| 6 | CD3-CD28-IL2-Tazemetostat 200 nM | 66.36 |
| 7 | CD3-CD28-IL2-GSK343 100 nM | 66.40 |
| 8 | CD3-CD28-IL2-GSK343 500 nM | 64.47 |
| 9 | CD3-CD28-IL2-GSK343 1 μM | 67.37 |
| 10 | CD3-CD28-Tazemetostat 10 nM | 77.81 |
| 11 | CD3-CD28-Tazemetostat 100 nM | 79.62 |
| 12 | CD3-CD28-Tazemetostat 200 nM | 78.45 |
| 13 | CD3-CD28-GSK343 100 nM | 75.26 |
| 14 | CD3-CD28-GSK343 500 nM | 67.97 |
| 15 | CD3-CD28-GSK343 1 μM | 76.18 |
| 16 | CD3-IL2-Tazemetostat 10 nM | 67.30 |
| 17 | CD3-IL2-Tazemetostat 100 nM | 63.89 |
| 18 | CD3-IL2-Tazemetostat 200 nM | 59.08 |
| 19 | CD3-IL2-GSK343 100 nM | 58.51 |
| 20 | CD3-IL2-GSK343 500 nM | 61.18 |
| 21 | CD3-IL2-GSK343 1 μM | 61.06 |

[0742] Effect of EZH2, BRD and Other Inhibitors to Generate Superior T Stem Cells for Adoptive Immunotherapy Showing Surface Expression of CD45RA+CD62L+CCR7+

[0743] Day 0: Blood was obtained from unidentified donor. After RBC lysis, PBMC were collected using Ficoll-Hypaque separation. 200 million T cells were isolated from PBMCs using CD3 microbeads. T cells were cultured overnight in XVIVO 15 medium (Lonza) with IL2 (50 IU/ml), 30 ng/ml of CD3 and CD28 antibodies

[0744] Day 1: Cells were plated in 24-well plates at a density of 0.3 million cells/ml in each well and treated with different drugs.

[0745] On day 7, culture medium was replaced with fresh medium with fresh drugs.

[0746] On day 13, culture medium was replaced with fresh medium and fresh drugs. Half of the cells were transferred to 6-well plates.

[0747] Day 14: An aliquot of cells with all the treatments listed above (for 13 days) was used to stain the cells with DiOC2(3) (60 ng/ml in RPMI medium) at 4° C. for 40 min, washed with RPMI medium, DiOC2(3) dye was effluxed at 37° C. for 90 min, washed with PBS+1% FBS, stained with CD62L-APC antibody. CD62L is a marker for resting T cells. (5 μl/100 μl/sample) at 4° C. for 1 h, washed twice with PBS+1% FBS and analyzed on flow cytometer to check if these drugs are affecting the dye-effluxing or Pgp+ (i.e., DiOC2(3)-dull) T-cell population.

[0748] Table 15 shows that treatment with inhibitors increased the Pgp+(DiOC2(3)-dull) and CD62L+ T cell population as shown below:

| | Treatment | |
|---|---|---|
| | | p5: double +ve |
| | p2: pgp+ | pgp+ and CD62L-APC+ |
| Name | from Live cells | from Live cells |
| Untreated (UT) | 21.12 | 3.78 |
| TAZE-100 nM | 42.9 | 14.5 |
| GSK334-500 nM | 15.65 | 3.15 |
| MECLO-100 nM | 22.22 | 3.74 |
| MECLO-500 nM | 20.11 | 3.72 |
| TAZE-100 + MECLO-100 | 38.06 | 9.76 |
| TAZE-100 + SC1-500 | 54.64 | 24.86 |
| GSK-500 + MECLO-100 | 19.11 | 4.15 |
| GSK-500 + SC1-500 | 53.03 | 24.84 |
| R05335-100 nM | 14.71 | 2.55 |
| R05335-500 nM | 16.22 | 2.3 |
| CBFB-500 nM | 16.01 | 2.85 |
| CBFB-1 μM | 20.93 | 3.56 |
| BI7273-100 nM | 16.69 | 2.73 |
| BI7273-500 nM | 16.34 | 2.38 |
| B9564-100 nM | 13.39 | 2.53 |
| B9564-500 nM | 15.56 | 3.03 |
| LP99-500 nM | 19.46 | 3.52 |
| LP99-1 μM | 20.66 | 4.18 |
| IBRD9-500 nM | 21.12 | 4.51 |
| IBRD9-1 μM | 31.69 | 7.26 |
| GSK503-1 μM | 47.87 | 15.79 |
| GSK503-2 μM | 56.13 | 19.99 |
| GSK126-100 nM | 36.37 | 8.83 |
| GSK126-500 nM | 26.61 | 8.08 |
| UNC1999-100 nM | 36.8 | 11.06 |
| UNC1999-500 nM | 31.14 | 8.9 |
| CPI169-100 nM | 25.52 | 4.68 |
| CPI169-200 nM | 30.65 | 6.4 |
| CPI360-100 nM | 25.15 | 5.82 |
| CPI360-500 | 35.55 | 11.11 |
| EI1-500 nM | 33.53 | 10.2 |
| EI1-1 μM | 59.77 | 19.21 |
| EPZ011989-500 nM | 64.39 | 18.77 |
| EPZ011989-1 μM | 62.54 | 16.8 |
| EPZ005687-10 nM | 23.99 | 5.21 |
| EPZ005687-100 nM | 16.94 | 3.87 |
| EED226-500 nM | 37.6 | 10.41 |
| EED226-1 μM | 43.53 | 11.82 |
| UNC0642-10 nM | 22.03 | 4.46 |
| UNC0642-100 nM | 32.51 | 4.81 |

[0749] A second aliquot of the cells cultured for 14 days with all the treatments listed above was washed with PBS+1% FBS, stained with CD8-PerCP, CD45RA-FITC, CCR7-PE and CD62L-APC (5 ul/100 ul/sample for each of 4 antibodies) at 4° C. for 1 h, washed twice with PBS+1% FBS and analyzed on flow cytometer to check if these drugs are enriching for T cells showing surface expression of CD8+CD45RA+CCR7+CD62L+.

[0750] The effect of various inhibitors on % of CD8+/CD45RA+/CCR7+/CD62L+(P4) and CD45RA+/CCR7+/CD62L+(P6) is shown in the following Table 16. The results show marked increase in the % of CD8+/CD45RA+/CCR7+/CD62L+ and CD45RA+/CCR7+/CD62L+ cells following treatment with different inhibitors. For example, the % of CD8+/CD45RA+/CCR7+/CD62L+ cells in the untreated sample was 56.3% and increased to >70% following treatment with R05335-500 nM, CBFB-500 nM, CBFB 1 pM, B17273 100 nM, B17273 500 nM, B9564 100 nM, B9564 500 nM, LP99 500 nM, LP99 1 μM, IBRD9 500 nM, IBRD9 1 μM, GSK503 1 μM, GSK503 2 μM, GSK126 100 nM, GSK126 500 nM, UNC1999 100 nM, UNC1999 500 nM, CP1169 100 nM, CP1169 200 nM, CPI360 100 nM, CPI360 500 nM, EI1 500 nM, EI1 1 μM, EPZ011989 500 nM, EPZ011989 1 μM, EPZ005687 10 nM, EPZ005687 100 nM, and EED226 500 nEED226 1 μM, UNC0642 10 nM and UNC0642 100 nM.

TABLE 16

| | | GATE P4 | |
|---|---|---|---|
| | | CD8(PerCP)+, | GATE P6 |
| | | CD45RA(FITC)+, | CD45RA(FITC)+, |
| | stat-020818 | CCR7 (PE)+, | CCR7 (PE)+, |
| Target Gene | Name of compound | CD62L(APC) | CD62L(APC) |
| | UTREATED | 56.3 | 51.92 |
| EZH2 | TAZE-100 nM | 59.72 | 52.24 |
| Tet2 | MECLO-100 nM | 57.65 | 53.02 |
| Tet2 | MECLO-500 nM | 75.78 | 66.64 |
| | TAZE-100 + MECLO-100 | 73.6 | 61.32 |
| | TAZE-100 + SC1-500 | 82.12 | 80.18 |
| | GSK-500 + MECLO-100 | 72.18 | 63.12 |
| | GSK-500 + SC1-500 | 85.56 | 78.74 |
| CBFb-Runx1 | R05335-500 nM | 79.9 | 69.95 |
| CBFb | CBFB-500 nM | 74.77 | 64.71 |
| CBFb | CBFB-1 μM | 74.12 | 65.61 |
| BRD9 | BI7273-100 nM | 70.33 | 57.15 |
| BRD9 | BI7273-500 nM | 77.81 | 61.86 |
| BRD9 | B9564-100 nM | 73.18 | 63.27 |
| BRD9 | B9564-500 nM | 83.31 | 73.75 |
| BRD9 | LP99-500 nM | 79.25 | 69.67 |
| BRD9 | LP99-1 μM | 79.77 | 67.58 |
| BRD9 | IBRD9-500 nM | 74.3 | 61.53 |
| BRD9 | IBRD9-1 μM | 79.18 | 67.77 |
| EZH2 | GSK503-1 μM | 75.24 | 63.54 |
| EZH2 | GSK503-2 μM | 75.8 | 62.62 |
| EZH2 | GSK126-100 nM | 76.44 | 67.75 |
| EZH2 | GSK126-500 nM | 79.6 | 67.65 |
| EZH2/EZH1 | UNC1999-100 nM | 71.75 | 59.08 |
| EZH2/EZH1 | UNC1999-500 nM | 74.57 | 60.97 |
| EZH2 | CPI169-100 nM | 81.07 | 70.48 |
| EZH2 | CPI169-200 nM | 75.83 | 66.23 |
| EZH2 | CPI360-100 nM | 81.01 | 70.85 |
| EZH2 | CPI360-500 nM | 81.26 | 69.62 |
| EZH2 | EI1-500 nM | 76.19 | 67.64 |
| EZH2 | EI1-1 μM | 78.47 | 66.83 |
| EZH2 | EPZ011989-500 nM | 70.63 | 57.62 |
| EZH2 | EPZ011989-1 μM | 72.83 | 58.31 |
| EZH2 | EPZ005687-10 nM | 74.86 | 64.01 |
| EZH2 | EPZ005687-100 nM | 79.65 | 69.92 |
| PCR2 (polycomb | EED226-500 nM | 70.21 | 60.45 |
| repressive complex 2) | | | |
| PCR2 (polycomb | EED226-1 μM | 74.83 | 60.45 |
| repressive complex 2) | | | |
| G9a histone | UNC0642-10 nM | 71.62 | 63.95 |
| methyltransferase | | | |
| G9a histone | UNC0642-100 nM | 82.37 | 75.75 |
| methyltransferase | | | |

[0751] Effect of Drug Treatments on Blincyto (Blinatumomab) Induced Cytotoxicity

[0752] After 20 days of treatment with the inhibitors, cells from the preceding experiment were tested for their ability to induce Blinatumomab induced cell death using the Matador cytotoxicity assay. For this purpose, untreated and inhibitors-treated T cells were plated in a 24 well plate at 2×10⁵ cells/well either alone or in the presence of 2×10⁵ Nalm6-GLuc cells in XVIVO medium without any additional growth factors. Blinatumomab (Blincyto) was added at final concentration of 100 ng/million T cells. Cells were cultured overnight and next day supernatant was collected and assayed using the Matador assay. For the Matador Assay, 15 μl of supernatant was added to 15 μl of XVIVO medium in each well of a 384-well plate and hGLuc assay was done by adding 15 μl of 1:100 CTZ per well in well mode. The results showed significant increase in cytotoxicity in cells treated with Eli (500 nM), EPZ005687 (100 nM), LP99 (1 μM), UNC1999 (100 nM), CPI169 (200 nM), CPI360 (100 nM) and CPI360 (500 nM) as compared to untreated T cells. Thus, in addition to their effect on T stem cells, the above inhibitors can be also used to enhance the cytotoxic potential of immune effector cells, such as CAR-T cells, TCR-T cells and Bispecific T cell engager, e.g, Blinatumomab-treated T cells.

[0753] Preventing and Reversing T-Cell Exhaustion in Disease

[0754] Unmodified Host: Infection

[0755] Patients suffering from chronic HIV, HCV, HBV infections are extensively reported to have T cells exhausted

[0756] In some embodiments, patients with chronic viral infections are treated with BRD9, EZH2, MLL2, MLL3, MLL4, methylcytosine dioxygenase genes (e.g., Tet1, Tet2, Tet3), ATM, CHEK, FBXW10, BCOR, FAT1, ASXL1, PHF6, SF3B1, YY1, CBFb, Runx1, EHMT2 (G9A), SMARCA4, CREBBP, PRDM1/BLIMP1 and HDAC2 inhibitor drugs either singly or in combination as follow: The population of patients suffering from chronic HIV, HCV, HBV infections is sampled to determine PD1 expression on their T cells obtained from peripheral blood mononuclear cells (PBMCs). The procedure of using PDl as a marker of exhaustion is applied to sample exhausted T cells present in chronic HIV and EBV infections and is, thus, an accepted criteria of exhaustion in chronic viral infections (Day et al., 2006, supra). This analysis is performed in comparison with healthy donors. Alternatively, virus-specific T cells are assayed for PD1 determined by tetramer co-staining. Subsequently, the CD4+ and CD8+ T cells are analyzed for PDl expression and co-stained for YY1, Ezh2 or cJun expression. This is followed by treatment with BRD9, EZH2, MLL2, MLL3, MLL4, methylcytosine dioxygenase genes (e.g., Tet1, Tet2, Tet3), ATM, CHEK, FBXW10, BCOR, FAT1, ASXL1, PHF6, SF3B1, YY1, CBFb, Runx1, EHMT2 (G9A), SMARCA4, CREBBP, PRDM1/BLIMP1, HDAC2, TRAIL and DR5 inhibitor drugs either singly or in combination. The BRD9, EZH2, MLL2, MLL3, MLL4, methylcytosine dioxygenase genes (e.g., Tet1, Tet2, Tet3), ATM, CHEK, FBXW10, BCOR, FAT1, ASXL1, PHF6, SF3B1, YY1, CBFb, Runx1, EHMT2 (G9A), SMARCA4, CREBBP, PRDM1/BLIMP1 and HDAC2 inhibitor drugs are directly injected or orally administered, e.g., i.p, i.v routes into patients suffering from chronic viral infections such as HIV, HCV, HBV. The dose and frequency of administration for each inhibitor is determined by measuring the inhibition of the target protein in the peripheral blood lymphocytes. In an alternate embodiment, the dose and frequency of administration is determined by pharmacokinetic studies to maintain the plasma level above the IC50 for each of the inhibitor drug.

[0757] Therefore, a major effect of BRD9, EZH2, MLL2, MLL3, MLL4, methylcytosine dioxygenase genes (e.g., Tet1, Tet2, Tet3), ATM, CHEK, FBXW10, BCOR, FAT1, ASXL1, PHF6, SF3B1, YY1, CBFb, Runx1, EHMT2 (G9A), SMARCA4, CREBBP, PRDM1/BLIMP1 and HDAC2 inhibitor drugs is expected to be on the virus-specific exhausted T cells that may reverse exhaustion by restoring IL2 production and T cell proliferation and BRD9, EZH2, MLL2, MLL3, MLL4, methylcytosine dioxygenase genes (e.g., Tet1, Tet2, Tet3), ATM, CHEK, FBXW10, BCOR, FAT1, ASXL1, PHF6, SF3B1, YY1, CBFb, Runx1, EHMT2 (G9A), SMARCA4, CREBBP, PRDM1/BLIMP1 and HDAC2 inhibitor drugs apart from IL2 rescue are expected to reduce exhaustion markers of PD1, Lag3 and Tim3.

[0758] Unmodified Host: Cancer

[0759] In some embodiments, patients with malignant cancers are treated with BRD9, EZH2, MLL2, MLL3, MLL4, methylcytosine dioxygenase genes (e.g., Tet1, Tet2, Tet3), ATM, CHEK, FBXW10, BCOR, FAT1, ASXL1, PHF6, SF3B1, YY1, CBFb, Runx1, EHMT2 (G9A), SMARCA4, CREBBP, PRDM1/BLIMP1, HDAC2, TRAIL and DR5 inhibitor drugs either alone or in combination. In one embodiment, the inhibitors are administered orally. In another embodiment, the inhibitors are administered parentally. In another embodiment, the inhibitors are directly injected at the site of tumors. A major effect of the inhibitor drugs is expected to be on the exhausted T cells infiltrating the tumors to help reverse exhaustion by restoring IL2 production and T cell proliferation.

[0760] Modified Host: Cancer, TILs Treatment

[0761] In some embodiments, cancer patients are treated with TILs modified with BRD9, EZH2, MLL2, MLL3, MLL4, methylcytosine dioxygenase genes (e.g., Tet1, Tet2, Tet3), ATM, CHEK, FBXW10, BCOR, FAT1, ASXL1, PHF6, SF3B1, YY1, CBFb, Runx1, EHMT2 (G9A), SMARCA4, CREBBP, PRDM1/BLIMP1, HDAC2, TRAIL and DR5 downregulation or inactivation as follows: Tumor infiltrating lymphocytes (TILs) are extracted from the tumor biopsies and grown in cultures. A standard protocol to grow TILs in tissue culture conditions is applied. In some embodiments, commercially available tumor dissociation kits (Miltenyi Biotech) are used. TILs are expanded in culture, activated and treated with BRD9, EZH2, MLL2, MLL3, MLL4, methylcytosine dioxygenase genes (e.g., Tet1, Tet2, Tet3), ATM, CHEK, FBXW10, BCOR, FAT1, ASXL1, PHF6, SF3B1, YY1, CBFb, Runx1, EHMT2 (G9A), SMARCA4, CREBBP, PRDM1/BLIMP1, HDAC2, TRAIL, and/or DR5 inhibitor or infected with BRD9, EZH2, MLL2, MLL3, MLL4, methylcytosine dioxygenase genes (e.g., Tet1, Tet2, Tet3), ATM, CHEK, FBXW10, BCOR, FAT1, ASXL1, PHF6, SF3B1, YY1, CBFb, Runx1, EHMT2 (G9A), SMARCA4, CREBBP, PRDM1/BLIMP1, HDAC2, TRAIL, and/or DR5 shRNA lentiviral particles to determine reversal of exhaustion phenotype. The chemical inhibitors used are listed in Table 6 are used at dose above their IC50 concentrations. The sequences of the shRNAs (e.g., SEQ ID NO: 274-335; 2226-2237) targeting the above genes is shown in Table 5. Once these in vitro results are confirmed from sample patients, a similar procedure is applied to the melanoma, ovarian cancer, synovial sarcoma, non-Small lung cancer patients. In such patients, TILs are extracted, expanded ex vivo and treated with BRD9, EZH2, MLL2, MLL3, MLL4, methylcytosine dioxygenase genes (e.g., Tet1, Tet2, Tet3), ATM, CHEK, FBXW10, BCOR, FAT1, ASXL1, PHF6, SF3B1, YY1, CBFb, Runx1, EHMT2 (G9A), SMARCA4, CREBBP, PRDM1/BLIMP1 and HDAC2 chemical inhibitors or infected with BRD9, EZH2, MLL2, MLL3, MLL4, methylcytosine dioxygenase genes (e.g., Tet1, Tet2, Tet3), ATM, CHEK, FBXW10, BCOR, FAT1, ASXL1, PHF6, SF3B1, YY1, CBFb, Runx1, EHMT2 (G9A), SMARCA4, CREBBP, PRDM1/BLIMP1, HDAC2, TRAIL, and/or DR5 shRNA encoding lentiviral vectors and infused back into subjects to generate antitumor responses. In another embodiment, TILs are extracted, expanded ex vivo and one or both alleles of BRD9, EZH2, MLL2, MLL3, MLL4, methylcytosine dioxygenase genes (e.g., Tet1, Tet2, Tet3), ATM, CHEK, FBXW10, BCOR, FAT1, ASXL1, PHF6, SF3B1, YY1, CBFb, Runx1, EHMT2 (G9A), SMARCA4, CREBBP, PRDM1/BLIMP1, HDAC2, TRAIL and/or DR5 are knocked out either singly or in combination using Cas9/CRISP approach using standard molecular biology techniques. In one embodiment, the knock-down of BRD9, EZH2, MLL2, MLL3, MLL4, methylcytosine dioxygenase genes (e.g., Tet1, Tet2, Tet3), ATM, CHEK, FBXW10, BCOR, FAT1, ASXL1, PHF6, SF3B1, YY1, CBFb, Runx1, EHMT2 (G9A), SMARCA4, CREBBP, PRDM1/BLIMP1, HDAC2, TRAIL, and/or DR5 is achieved by infecting cells with a lentiviral vector encoding Streptococcus pyogenese Cas9/CRISP and gRNA sequences targeting BRD9, EZH2, MLL2, MLL3, MLL4, methylcytosine dioxygenase genes (e.g., Tet1, Tet2, Tet3), ATM, CHEK, FBXW10, BCOR, FAT1, ASXL1, PHF6, SF3B1, YY1, CBFb, Runx1, EHMT2 (G9A), SMARCA4, CREBBP, PRDM1/BLIMP1, HDAC2, TRAIL, and/or DR5. For example, double stranded oligonucleotides corresponding to gRNA sequences targeting BRD9, EZH2, MLL2, MLL3, MLL4, methylcytosine dioxygenase genes (e.g., Tet1, Tet2, Tet3), ATM, CHEK, FBXW10, BCOR, FAT1, ASXL1, PHF6, SF3B1, YY1, CBFb, Runx1, EHMT2 (G9A), SMARCA4, CREBBP, PRDM1/BLIMP1, HDAC2, TRAIL, and DR5 are synthesized and cloned in the pLenti-CRISPR-v2 vector (SEQ ID NO: 359) obtained from Addgene. The sequence of the gRNAs (SEQ ID NO: 1-104; 1775-1786) targeting the above genes is provided in Table 4a. The lentiviruses are prepared following the recommendations available from Addgene and used to infect TILs. Subsequently, TILs are expanded in T cell culture media containing CD3/CD28 beads and IL2 (30 IU) and used for in vitro and in vivo studies and for human clinical trials.

[0762] In another embodiment, TILs are extracted, expanded ex vivo and genetically engineered to express constitutively active mutants of JAK1, JAK3, STAT5b, STAT3, IL2RG, CARD11 and BRAF either alone or in combination. The SEQ ID NO of the constitutive active mutants of JAK1(e.g., SEQ ID NO:375-376), JAK3 (e.g., SEQ ID NO:361-367), STAT5b (e.g., SEQ ID NO:369-373), STAT3 (e.g., SEQ ID NO:381-385), IL2RG (e.g., SEQ ID NO:387), CARD11 (e.g., SEQ ID NO:378-379) and BRAF (e.g., SEQ ID NO:389) are provided in Table 1. In another embodiment, TILs are extracted, expanded ex vivo and genetically engineered to express constitutively active mutants of JAK1, JAK3, STAT5b, STAT3, IL2RG, CARD11 and BRAF either alone or in combination along with lentiviral vectors encoding shRNAs targeting one or more of BRD9, EZH2, MLL2, MLL3, MLL4, methylcytosine dioxygenase genes (e.g., Tet1, Tet2, Tet3), ATM, CHEK, FBXW10, BCOR, FAT1, ASXL1, PHF6, SF3B1, YY1, CBFb, Runx1, EHMT2 (G9A), SMARCA4, CREBBP, PRDM1/BLIMP1, HDAC2, TRAIL and/or DR5. In another embodiment, TILs are extracted, expanded ex vivo and genetically engineered to express constitutively active mutants of JAK1, JAK3, STAT5b, STAT3, IL2RG, CARD11 and BRAF either alone or in combination along with lentiviral vectors encoding Streptococcus pyogenese Cas9/CRISP and gRNA sequences targeting BRD9, EZH2, MLL2, MLL3, MLL4, methylcytosine dioxygenase genes (e.g., Tet1, Tet2, Tet3), ATM, CHEK, FBXW10, BCOR, FAT1, ASXL1, PHF6, SF3B1, YY1, CBFb, Runx1, EHMT2 (G9A), SMARCA4, CREBBP, PRDM1/BLIMP1, HDAC2, TRAIL and/or DR5. In another embodiment, TILs are extracted, expanded ex vivo in the presence of chemical inhibitors of one or more of BRD9, EZH2, MLL2, MLL3, MLL4, methylcytosine dioxygenase genes (e.g., Tet1, Tet2, Tet3), ATM, CHEK, FBXW10, BCOR, FAT1, ASXL1, PHF6, SF3B1, YY1, CBFb, Runx1, EHMT2 (G9A), SMARCA4, CREBBP, PRDM1/BLIMP1, HDAC2, TRAIL and/or DR5 and genetically engineered to express constitutively active mutants of JAK1, JAK3, STAT5b, STAT3, IL2RG, CARD11 and BRAF either alone or in combination

[0763] Modified Host: Infection, CAR-T and TCR-T Treatment

[0764] CAR-T cells and TCR-T cells are modified by co-transduction or sequential transduction to express RNAi or shRNA or other inhibitory RNA to prevent BRD9, EZH2, MLL2, MLL3, MLL4, methylcytosine dioxygenase genes (e.g., Tet1, Tet2, Tet3), ATM, CHEK, FBXW10, BCOR, FAT1, ASXL1, PHF6, SF3B1, YY1, CBFb, Runx1, EHMT2 (G9A), SMARCA4, CREBBP, PRDM1/BLIMP1, HDAC2, TRAIL, and/or DR5 expression. In another embodiment, the CAR-T/TCR-T cells are modified by co-transduction or sequential transduction to express constitutively active form of JAK1, JAK3, STAT5b, STAT3, IL2RG, CARD11 and BRAF either alone or in combination. In another embodiment, the CAR-T and TCR-T cells are modified by co-transduction or sequential transduction to express constitutively active form of JAK1, JAK3, STAT5b, STAT3, IL2RG, CARD11 and BRAF either alone or in combination along with RNAi or Rz or other inhibitory RNA to prevent BRD9, EZH2, MLL2, MLL3, MLL4, methylcytosine dioxygenase genes (e.g., Tet1, Tet2, Tet3), ATM, CHEK, FBXW10, BCOR, FAT1, ASXL1, PHF6, SF3B1, YY1, CBFb, Runx1, EHMT2 (G9A), SMARCA4, CREBBP, PRDM1/BLIMP1, HDAC2, TRAIL, and/or DR5 expression.

[0765] For CAR/TCR vector with BRD9, EZH2, MLL2, MLL3, MLL4, methylcytosine dioxygenase genes (e.g., Tet1, Tet2, Tet3), ATM, CHEK, FBXW10, BCOR, FAT1, ASXL1, PHF6, SF3B1, YY1, CBFb, Runx1, EHMT2 (G9A), SMARCA4, CREBBP, PRDM1/BLIMP1, HDAC2, TRAIL, and/or DR5 knockdown, one may use two separate vector systems to express CARs and BRD9, EZH2, MLL2, MLL3, MLL4, methylcytosine dioxygenase genes (e.g., Tet1, Tet2, Tet3), ATM, CHEK, FBXW10, BCOR, FAT1, ASXL1, PHF6, SF3B1, YY1, CBFb, Runx1, EHMT2 (G9A), SMARCA4, CREBBP, PRDM1/BLIMP1 and HDAC2 siRNA, shRNA or miRNA. In some embodiments, a single vector system employing separate promoters, one specific for CAR/TCR transcription and the other promoter for BRD9, EZH2, MLL2, MLL3, MLL4, methylcytosine dioxygenase genes (e.g., Tet1, Tet2, Tet3), ATM, CHEK, FBXW10, BCOR, FAT1, ASXL1, PHF6, SF3B1, YY1, CBFb, Runx1, EHMT2 (G9A), SMARCA4, CREBBP, PRDM1/BLIMP1, HDAC2, TRAIL, and/or DR5 siRNA, shRNA or miRNA transcription is used.

[0766] For CAR/TCR vector with co-expression of constitutively active form of JAK1, JAK3, STAT5b, STAT3, IL2RG, CARD11 and BRAF, one may use two separate vector systems to express CARs and constitutively active mutant forms of JAK1, JAK3, STAT5b, STAT3, IL2RG, CARD11 and BRAF. In some embodiments, a single vector system employing separate promoters, one specific for CAR/TCR transcription and the other promoter for expression of constitutively active form of JAK1, JAK3, STAT5b, STAT3, IL2RG, CARD11 and BRAF transcription is used. In some embodiments, a single vector system employing a single promoter is used to express an expression cassette encoding both a CAR/TCR transcription and a constitutively active form of JAK1, JAK3, STAT5b, STAT3, IL2RG, CARD11 and BRAF in which the nucleic acids encoding the CAR/TCR and the mutants are separated by a 2A sequence. Several exemplary expression cassettes encoding a CAR/TCR and a a constitutively active form of JAK1, JAK3, STAT5b, STAT3, IL2RG, CARD11 and BRAF are represented by SEQ ID NO: 484-499. Other such expression constructs can be constructed by replacing the nucleic acids encoding the CAR/TCR with nucleic acids encoding different CAR/TCRs. Thus, the nucleic acid encoding CD8SP-FMC63-(vL-vH)-Myc-BBz cassette in SEQ ID NO: 484 can be replaced by nucleic acid encoding a different CAR or a TCR. Similarly, the nucleic acids encoding the JAK3-M511I mutant can be replaced by nucleic acid encoding a different mutant JAK1(e.g., SEQ ID NO:375-376), JAK3 (e.g., SEQ ID NO:362-367), STAT5b (e.g., SEQ ID NO:369-373), STAT3 (e.g., SEQ ID NO:381-385), IL2RG (e.g., SEQ ID NO:387), CARD11 (e.g., SEQ ID NO:378-379) and BRAF (e.g., SEQ ID NO:389). In some embodiments, the expression of constitutively active form of JAK1, JAK3, STAT5b, STAT3, IL2RG, CARD11 and BRAF in CAR-T/TCR-T cells is achieved by alteration of their genomic locus by homologous recombination. For example, one or more copies of JAK3 gene in the CAR-T cells can be modified by homologous recombination to mutate it to JAK3-M511I mutant form by using Cas9/CRISP system.

[0767] In another embodiment, the patients have CAR-T/TCR-t expanded ex vivo in the presence of chemical inhibitors of one or more of BRD9, EZH2, MLL2, MLL3, MLL4, methylcytosine dioxygenase genes (e.g., Tet1, Tet2, Tet3), ATM, CHEK, FBXW10, BCOR, FAT1, ASXL1, PHF6, SF3B1, YY1, CBFb, Runx1, EHMT2 (G9A), SMARCA4, CREBBP, PRDM1/BLIMP1, HDAC2, TRAIL, and/or DR5, before administration to the patient. The ex-vivo expansion of CAR-T/TCR-T cells may also include inhibitors of AKT/PI3K pathway and other immunomodulatory drugs, such as Lenalidomide.

[0768] In another embodiment, the patients have CAR-T/TCR-T expanded and administered without ex vivo treatment or modification. The CAR-T/TCR-T cells are infused and the patient treated with BRD9, EZH2, MLL2, MLL3, MLL4, methylcytosine dioxygenase genes (e.g., Tet1, Tet2, Tet3), ATM, CHEK, FBXW10, BCOR, FAT1, ASXL1, PHF6, SF3B1, YY1, CBFb, Runx1, EHMT2 (G9A), SMARCA4, CREBBP, PRDM1/BLIMP1, HDAC2, TRAIL, and/or DR5 inhibitor for days, weeks, months or years as needed to maintain the anticancer or antiviral effect. The patient may also receive treatment with AKT/PI3K inhibitors and/or immunomodulatory drugs (IMiDs) such as lenalidomide.

[0769] Essentially a similar approach is used to expand other immune effector cells including but not limited to those expressing TCR, SIR, TFP, and/or AbTCR etc.

[0770] Co-Application with Other Anti-Exhaustion Measures

[0771] BRD9, EZH2, MLL2, MLL3, MLL4, methylcytosine dioxygenase genes (e.g., Tet1, Tet2, Tet3), ATM, CHEK, FBXW10, BCOR, FAT1, ASXL1, PHF6, SF3B1, YY1, CBFb, Runx1, EHMT2 (G9A), SMARCA4, CREBBP, PRDM1/BLIMP1, HDAC2, TRAIL, and/or DR5 inhibitor agents and/or constitutively active form of JAK1, JAK3, STAT5b, STAT3, IL2RG, CARD11 and BRAF described above are administered in combination with interventions against checkpoint receptors or their ligands (“dual treatment”). In some embodiments, BRD9, EZH2, MLL2, MLL3, MLL4, methylcytosine dioxygenase genes (e.g., Tet1, Tet2, Tet3), ATM, CHEK, FBXW10, BCOR, FAT1, ASXL1, PHF6, SF3B1, YY1, CBFb, Runx1, EHMT2 (G9A), SMARCA4, CREBBP, PRDM1/BLIMP1, HDAC2, TRAIL, and/or DR5 inhibitor agents and/or constitutively active form of JAK1, JAK3, STAT5b, STAT3, IL2RG, CARD11 and BRAF described above are administered in combination with bispecific and multispecific engagers described in this disclosure, such as Blinatumomab.

[0772] In some embodiments, cancer patients who are eligible for treatment with antibodies for checkpoint receptor blockade (e.g., non-small cell lung cancer, transitional cell cancer, melanoma, others) are treated with checkpoint axis antibody (e.g., nivolumab, atezolizumab) and BRD9, EZH2, MLL2, MLL3, MLL4, methylcytosine dioxygenase genes (e.g., Tet1, Tet2, Tet3), ATM, CHEK, FBXW10, BCOR, FAT1, ASXL1, PHF6, SF3B1, YY1, CBFb, Runx1, EHMT2 (G9A), SMARCA4, CREBBP, PRDM1/BLIMP1, HDAC2, TRAIL, and/or DR5, inhibitor drugs (dual treatment) as follows: The procedure of applying dual treatment in cancer patients follows the methods established for each of the checkpoint axis antibodies for determining eligibility with specific tumor types: some require testing tumor for PDL1 expression and others do not. If data support that reversal of exhaustion with checkpoint receptor antibodies induces tumor responses, this is considered adequate justification to improve the responses with the addition of BRD9, EZH2, MLL2, MLL3, MLL4, methylcytosine dioxygenase genes (e.g., Tet1, Tet2, Tet3), ATM, CHEK, FBXW10, BCOR, FAT1, ASXL1, PHF6, SF3B1, YY1, CBFb, Runx1, EHMT2 (G9A), SMARCA4, CREBBP, PRDM1/BLIMP1, HDAC2, TRAIL, and/or DR5, inhibitor strategies.

[0773] In some embodiments, BRD9, EZH2, MLL2, MLL3, MLL4, methylcytosine dioxygenase genes (e.g., Tet1, Tet2, Tet3), ATM, CHEK, FBXW10, BCOR, FAT1, ASXL1, PHF6, SF3B1, YY1, CBFb, Runx1, EHMT2 (G9A), SMARCA4, CREBBP, PRDM1/BLIMP1, HDAC2, TRAIL, and/or DR5, inhibitor agents and/or constitutively active form of JAK1, JAK3, STAT5b, STAT3, IL2RG, CARD11 and BRAF described above are administered in combination with bispecific and multispecific engagers, such as Blinatumomab, and/or costimulatory agents (e.g., Utomilumab) and/or check point inhibitors (e.g., nivolumab, atezolizumab) and/or immunomodulatory drugs (e.g, Lenalidomide).

[0774] Knockout in CAR-T Cells to Resist Exhaustion and to Promote Long-Term Persistence

[0775] Exhaustion is reported in several different CAR-T cells (Long et al., 2015). Knocking out BRD9, EZH2, MLL2, MLL3, MLL4, methylcytosine dioxygenase genes (e.g., Tet1, Tet2, Tet3), ATM, CHEK, FBXW10, BCOR, FAT1, ASXL1, PHF6, SF3B1, YY1, CBFb, Runx1, EHMT2 (G9A), SMARCA4, CREBBP, PRDM1/BLIMP1, HDAC2, TRAIL, and/or DR5 is contemplated to allow the generation of a diverse immune response by altering the proliferation, survival, cytokine secretion, cytotoxicity, terminal differentiation, exhaustion and in vivo persistence of engineered T cells.

[0776] To generate a diverse pool of CAR-T cells, BRD9, EZH2, MLL2, MLL3, MLL4, methylcytosine dioxygenase genes (e.g., Tet1, Tet2, Tet3), ATM, CHEK, FBXW10, BCOR, FAT1, ASXL1, PHF6, SF3B1, YY1, CBFb, Runx1, EHMT2 (G9A), SMARCA4, CREBBP, PRDM1/BLIMP1, HDAC2, TRAIL, and/or DR5, is knocked-out using CRISPR/Cas9-mediated gene knockout in CAR-T cells. The knock out in CAR-T cells is achieved by electroporating Cas9 mRNA and guide RNA (gRNA) for BRD9, EZH2, MLL2, MLL3, MLL4, methylcytosine dioxygenase genes (e.g., Tet1, Tet2, Tet3), ATM, CHEK, FBXW10, BCOR, FAT1, ASXL1, PHF6, SF3B1, YY1, CBFb, Runx1, EHMT2 (G9A), SMARCA4, CREBBP, PRDM1/BLIMP1, HDAC2, TRAIL, and/or DR5. The guide RNA (gRNA) are designed to target the exons of the above genes and are listed in Table 8. In some assays, cas-9 is Cas9 ribonucleoproteins (RNPs). In some assays, Cas9 RNP and in vitro transcribed gRNA targeting BRD9, EZH2, MLL2, MLL3, MLL4, methylcytosine dioxygenase genes (e.g., Tet1, Tet2, Tet3), ATM, CHEK, FBXW10, BCOR, FAT1, ASXL1, PHF6, SF3B1, YY1, CBFb, Runx1, EHMT2 (G9A), SMARCA4, CREBBP, PRDM1/BLIMP1, HDAC2, TRAIL, and/or DR5 are preassembled and then electroporated into T cells.

[0777] In another embodiment, the CAR-T cells are modified by co-transduction or sequential transduction to express constitutively active form of JAK1, JAK3, STAT5b, STAT3, IL2RG, CARD11 and BRAF either alone or in combination along with knock-out of BRD9, EZH2, MLL2, MLL3, MLL4, methylcytosine dioxygenase genes (e.g., Tet1, Tet2, Tet3), ATM, CHEK, FBXW10, BCOR, FAT1, ASXL1, PHF6, SF3B1, YY1, CBFb, Runx1, EHMT2 (G9A), SMARCA4, CREBBP, PRDM1/BLIMP1, HDAC2, TRAIL, and/or DR5. In some embodiments, constitutively active form of JAK1, JAK3, STAT5b, STAT3, IL2RG, CARD11 and/or BRAF are expressed in CAR-T cells using the same vector as that used to express CAR. In alternate embodiments, constitutively active form of JAK1, JAK3, STAT5b, STAT3, IL2RG, CARD11 and/or BRAF are expressed in CAR-T cells using a separate vector then the one used to express CAR. In some embodiment, constitutively active forms of JAK1, JAK3, STAT5b, STAT3, IL2RG, CARD11 and/or BRAF are expressed in immune effector cells by inducing mutation in their genomic allele(s) using homologous recombination, for example, using CAS9 system.

[0778] Analogous applications of BRD9, EZH2, MLL2, MLL3, MLL4, methylcytosine dioxygenase genes (e.g., Tet1, Tet2, Tet3), ATM, CHEK, FBXW10, BCOR, FAT1, ASXL1, PHF6, SF3B1, YY1, CBFb, Runx1, EHMT2 (G9A), SMARCA4, CREBBP, PRDM1/BLIMP1, HDAC2, TRAIL, and/or DR5 knockout and/or expression of constitutively active forms of JAK1, JAK3, STAT5b, STAT3, IL2RG, CARD11 and/or BRAF with other immune effector cells including, but not limited to, TILs, transferred-TCR T cells or anti-viral CAR-T cells is also suitable.

[0779] Use of Blinatumomab and Other T Cell Bispecific Engagers for Activation and Expansion of T Cells In Vitro

[0780] Buffy coat cells are obtained from healthy de-identified adult donors from the Blood Bank and used to isolate peripheral blood mononuclear cells (PBMC) by Ficoll-Hypaque gradient centrifugation. PBMC are either used as such or used to isolate T cells using CD3 magnetic microbeads (Miltenyi Biotech) and following the manufacturer's instructions. PBMC or isolated T cells are re-suspended in XVIVO medium (Lonza) supplanted with 10 ng/ml CD3 antibody, 10 ng/ml CD28 antibody and 100 IU recombinant human-IL2. In an alternate embodiment, PBCM or T cells are activated by resuspending them at concentration of 5×10⁵ cells/ml in fresh XVIVO media containing Blinatumomab (10 ng/ml) plus irradiated (100 Gy) REC-1 cells (Mantle Cell lymphoma; ATCC Catalog #CRL-3004) at concentration of 5×10⁶ cells/ml in the presence of 50 IU recombinant human-IL2. In another alternate embodiment, the cell culture medium further contains a purified CD19×CD28 bispecific antibody (SEQ ID NO: 2708, 2705 or 2706) and/or a CD19×41BB bispecific antibody (SEQ ID NO: 2761, 2762, 2758 or 2764) each at concentration of about 10 ng/ml. Cells are cultured at 37° C., in a 5% CO₂ humidified incubator. Cells are activated in the above medium for 1 day prior to infection with lentiviral vectors encoding a CAR or a TCR (e.g., SEQ ID NO: 2822 to 2835) or a TCR (SEQ ID NO: 2836). In general, primary cells (e.g. T cells) are infected in the morning using spin-infection (1800 rpm for 90 minutes at 37° C. with 300 μl of concentrated virus that has been re-suspended in XVIVO medium in the presence of 8 μg/ml of Polybrene® (Sigma, Catalog no. H9268). After the infection, the cells are pelleted and resuspended at concentration of 5×10⁵ cells/ml in fresh XVIVO media containing Blinatumomab (10 ng/ml) plus irradiated (100 Gy) REC-1 (Mantle Cell lymphoma; ATCC Catalog #CRL-3004) cells (5×10⁶ cells/ml) and 50 IU recombinant human-IL2. Cells are cultured in the above medium for 10-15 days. Culture media is supplemented with fresh REC-1 cells, blinatumomab and IL2 every 2-4 days. Robust expansion of cells is achieved upon culture in the presence of REC-1 cells and blinatumomab as measured by CFSE stainng. The expanded CAR-T cells are subsequently used for in vitro cytotoxicity studies, in vivo efficacy studies in NSG mice and clinical trial of patients with cancers expressing the antigens targeted by the CAR/TCR using methods known in the art.

[0781] The above experiment is also repeated using CD19+ RAJI and NALM6 cells. Although expansion is seen upon co-culturing of CAR or TCR expressing T cells with RAJI and NALM6 cells in the presence of Blinatumomb, the degree of expansion is less than that observed with REC-1 cells. Thus, mantle cell lymphoma cells and, in particular, REC-1 cells are the preferred antigen presenting cells for expansion of T cells (e.g., CAR-T cells, TCR-T cells and TILs) when used in conjuction with bispecific T cell engagers that has at least one binding domain that binds to an antigen expressed on REC-1 (e.g, CD19, CD20, CD22 and BCMA). REC-1 cells also are the preferred antigen presenting cells for expansion of CAR-T cells targeting CD19, CD20, CD22 and BCMA.

[0782] The experiment is repeated by replacing REC-1 cells by CD19-ectodomain coated magnetic beads (CD19-ECD-beads). CAR-T cells are incubated with CD19-ECD-beads at ratio of 1:1, 1:5 and 1:10 in in fresh XVIVO media containing Blinatumomab (10 ng/ml) and a CD28 antibody (10 ng/ml) and IL2 (50 IU). In an alternate embodiment, the cell culture medium further contains a purified CD19×CD28 bispecific antibody (SEQ ID NO: 2708, 2705 or 2706) and/or a CD19×41BB bispecific antibody (SEQ ID NO: 2761, 2762, 2758 or 2764) each at concentration of about 10 ng/ml. Cells are cultured at 37° C., in a 5% CO₂ humidified incubator for 10-25 days. Robust expansion of CAR-T cells is seen upon incubation with CD19-ECD beads in the presence of Blinatumomab.

[0783] Essentially a similar procedure as described above is used for infection with CAR-encoding retroviruses. Essentially a similar procedure is used for expansion of T cells transduced with CARs and TCR encoded by sleeping beauty or piggybac transposons. Transduction of T cells with CAR-encoding sleeping beauty and piggyback transposons is carried out essentially as described previously (Nakazawa et al, J Immunother 32, 8, October 2009 and Kebriaei et al, Clin Invest. 2016; 126(9):3363-3376). Cells are expanded with Blinatumomab and REC-1 cells as described above.

[0784] The above experiments are repeated with the exception that CD28 antibody is replaced by a CD19×CD28 bispecific antibody (e.g., SEQ ID NO: 2708, 2705 or 2706). The CAR expressing PBMC and/or T cells in the presence of Blinatumomab and a CD19×CD28 bispecific antibody (SEQ ID NO: 2708, 2705 or 2706) and REC-1 cells or JEKO cells and IL2 (50 IU). The CD19×CD28 bispecific antibody is used at concentrations between 100 μg/ml and 100 ng/ml. Robust expansion of CAR-expressing PBMC and/or T cells is seen when expanded in the presence of REC-1 cells and Blinatumomab, a CD19×CD28 bispecific antibody and IL2. The expanded CAR-T cells are subsequently used for in vitro cytotoxicity studies, in vivo efficacy studies in NSG mice and clinical trial of patients with cancers expressing the antigens targeted by the CAR/TCR using methods known in the art.

[0785] Essentially a similar procedure is used to expand the CAR-T expressing PBMC and/or T cells in the presence of Blinatumomab and a CD19×41BB bispecific antibody (SEQ ID NO: 2761, 2762, 2758 or 2764) and REC-1 cells. The CD19×41BB bispecific antibody is used at concentrations between 100 μg/ml and 100 ng/ml.

[0786] Essentially a similar procedure is used to expand the CAR-T expressing PBMC and/or T cells in the presence of Blinatumomab and REC-1 cells plus Utomilumab. The Blinatumomab and Utomilumab are each used at concentrations between 100 μg/ml and 100 ng/ml.

[0787] Essentially a similar procedure is used to expand the CAR-T expressing PBMC and/or T cells in the presence of Blinatumomab and REC-1 cells plus a CD28 agonist antibody. The Blinatumomab and Utomilumab are each used at concentrations between 100 μg/ml and 100 ng/ml.

[0788] Essentially a similar procedure is used to expand the CAR-T expressing PBMC and/or T cells in the presence of a BCMA x CD3 DART and a BCMA x CD28 bispecific antibody (SEQ ID NO: 2709, 2711 or 2712) and U266 cells. The BCMA x CD3 DART and BCMA x CD28 bispecific antibodies are used at concentrations between 100 μg/ml and 100 ng/ml.

[0789] Essentially a similar procedure is used to expand the CAR-T expressing PBMC and/or T cells in the presence of a BCMA x CD3 DART bispecific anitbody and a BCMA x 41BB bispecific antibody (SEQ ID NO: 2765, 2766 or 2767) and U266 cells. The BCMA x CD3 DART and BCMA x 41BB bispecific antibodies are used at concentrations between 100 μg/ml and 100 ng/ml.

[0790] Essentially a similar procedure is used to expand the CAR-T expressing PBMC and/or T cells in the presence of a CD22×CD3 bispecific antibody (SEQ ID NO: 2668, 2667, or 2663) and a CD19×CD28 bispecific antibody ((SEQ ID NO: 2708, 2705 or 2706) and REC-1 or JEKO cells. The CD22×CD3 bispecific and CD19×CD28 bispecific antibodies are used at concentrations between 100 μg/ml and 100 ng/ml. The experiment is also repeated using RAJI and NALM6 cells. Although expansion is seen upon co-culturing of CAR or TCR expressing T cells with RAJI and NALM6 cells in the presence of Blinatumomb, the degree of expansion is less than that observed with REC-1 cells.

[0791] Essentially a similar procedure is used to expand the CAR-T expressing PBMC and/or T cells in the presence of Blinatumomab and a CD22×41BB bispecific antibody (SEQ ID NO: 2775, 2778 or 2780) and REC-1 cells. The Blinatumomab and CD22×41BB bispecific antibody are used at concentrations between 100 μg/ml and 100 ng/ml.

[0792] In the preceding examples, bispecific antibodies are used to expand CAR-T expressing cells.

[0793] Essentially a similar procedure can be used to expand any T cell (e.g., TILs, recombinant TCR expressing T cell etc.) by using bispecific antibodies that bind to and activate T cells through one of their antigen binding domains and bind to an antigen expressed on an antigen presenting cell. For example, Blinatumomab, with or without a CD19×CD28 bispecific antibody (e.g., SEQ ID NO; 2708, 2705 or 2706) can be used to expand TILs or to expand T cells expressing a recombinant NY-ESO1 TCR or to expand T cells expressing a Mesothelin SIR when grown in the presence of CD19-expressing cells, such as REC-1 or K562-CD19 or Jeko-1 cells.

[0794] Use of Bispecific T Cell Engagers Targeting Different Antigens in the Presence of APC and APS

[0795] Buffy coat cells are obtained from healthy de-identified adult donors from the Blood Bank and used to isolate peripheral blood mononuclear cells (PBMC) by Ficoll-Hypaque gradient centrifugation. PBMC are either used as such or used to isolate T cells using CD3 magnetic microbeads (Miltenyi Biotech) and following the manufacturer's instructions. PBMC or isolated T cells are re-suspended in XVIVO medium (Lonza) supplanted with 10 ng/ml CD3 antibody, 10 ng/ml CD28 antibody and 100 IU recombinant human-IL2. Cells are cultured at 37° C., in a 5% CO2 humidified incubator. Cells are activated in the above medium for 1 day prior to infection with lentiviral vectors encoding a CAR or a TCR (e.g., SEQ ID NO: 2822 to 2835) or a TCR (SEQ ID NO: 2836). After the infection, the cells are pelleted and resuspended at concentration of 5×10⁵ cells/ml in fresh XVIVO media containing the Antigen presenting cells (APC) or antigen presenting substrate (APS), primary activation stimuli, co-stimulation agents and additional cytokines as shown in Table 17. All antibodies, inlcuding bispecific atnibodies, CD3, CD28 and Utomilumab are added at concentration of 10 ng/ml. The cytokines (IL2, IL7 or IL15) are added at concentration of 30-50 IU each. Cells are cultured in the above medium for 10-25 days. Culture media is exchanged with fresh media every 2-4 days. The expanded CAR-T cells are subsequently used for in vitro cytotoxicity studies, in vivo efficacy studies in NSG mice and clinical trial of patients with cancers expressing the antigens targeted by the CAR/TCR using methods known in the art.

[0796] Table 17

TABLE 17

| Exp. | | Activation | SEQ ID | | SEQ ID | Others |
|---|---|---|---|---|---|---|
| # | APC/APS | Stimulus | (PRT) | Costimulation | (PRT) | Additives |
| 1 | CD19-ECD- | Blinatumomab | | CD28 antibody | | IL2 |
| | Beads | | | beads | | |
| 2 | REC-1 | Blinatumomab | | Soluble CD28 | | IL2 |
| | | | | antibody | | |
| 3 | REC-1 | Blinatumomab | | Utomilumab | | IL2 + IL7 |
| 4 | REC-1 | Blinatumomab | | CD19 × CD28 | 2702 | IL15 + IL7 |
| 5 | REC-1 | Blinatumomab | | CD19 × 41BB | 2758 | IL2 |
| 6 | JEKO-1 | Blinatumomab | | CD22 × CD28 | 2724 | IL2 |
| 7 | REC-1 | Blinatumomab | | CD22 × 41BB | 2780 | IL2 + IL7 |
| 8 | REC-1 | Blinatumomab | | CD22 × CD28 | 2719 | IL15 + IL7 |
| 9 | REC-1 | Blinatumomab | | CD22 × 41BB | 2775 | IL2 |
| 10 | JEKO-1 | Blinatumomab | | CD20 × CD28 | 2713 | IL2 |
| 11 | REC-1 | Blinatumomab | | CD20 × 41BB | 2774 | IL2 |
| 12 | CD22-ECD- | CD22 × CD3 | 2663 | CD28 antibody | | IL2 |
| | Beads | | | beads | | |
| 13 | REC-1 | CD22 × CD3 | 2663 | CD28 antibody | | IL2 |
| | beads | | | | | |
| 14 | REC-1 | CD22 × CD3 | 2666 | CD28 antibody | | IL2 + IL7 |
| 15 | REC-1 | CD22 × CD3 | 2668 | Utomilumab | | IL15 + IL7 |
| 16 | REC-1 | CD22 × CD3 | 2663 | CD19 × CD28 | 2702 | IL2 |
| 17 | REC-1 | CD22 × CD3 | 2490 | CD19 × 41BB | 2758 | IL2 |
| 18 | JEKO-1 | CD22 × CD3 | 2668 | CD22 × CD28 | 2724 | IL2 + IL7 |
| 19 | REC-1 | CD22 × CD3 | 2663 | CD22 × 41BB | 2780 | IL15 + IL7 |
| 20 | REC-1 | CD22 × CD3 | 2666 | CD22 × CD28 | 2719 | IL2 |
| 21 | REC-1 | CD22 × CD3 | 2668 | CD22 × 41BB | 2775 | IL2 |
| 22 | JEKO-1 | CD22 × CD3 | 2663 | CD20 × CD28 | 2713 | IL2 |
| 23 | REC-1 | CD22 × CD3 | 2668 | CD20 × 41BB | 2774 | IL2 |
| 24 | CD19-ECD- | CD20 × CD3 | 2657 | CD28 antibody | | IL2 |
| | Beads | | | beads | | |
| 25 | REC-1 | CD20 × CD3 | 2658 | CD28 antibody | | IL2 |
| 26 | GRANTA-519 | CD20 × CD3 | 2660 | Utomilumab | | IL2 + IL7 |
| 27 | REC-1 | CD20 × CD3 | 2657 | CD19 × CD28 | 2702 | IL15 + IL7 |
| 28 | REC-1 | CD20 × CD3 | 2658 | CD19 × 41BB | 2758 | IL2 |
| 29 | JEKO-1 | CD20 × CD3 | 2660 | CD22 × CD28 | 2724 | IL2 |
| 30 | REC-1 | CD20 × CD3 | 2657 | CD22 × 41BB | 2780 | IL2 + IL7 |
| 31 | REC-1 | CD20 × CD3 | 2658 | CD22 × CD28 | 2719 | IL15 + IL7 |
| 32 | REC-1 | CD20 × CD3 | 2660 | CD22 × 41BB | 2775 | IL2 |
| 33 | JEKO-1 | CD20 × CD3 | 2657 | CD20 × CD28 | 2713 | IL2 |
| 34 | REC-1 | CD20 × CD3 | 2658 | CD20 × 41BB | 2774 | IL2 |
| 35 | BCMA-ECD- | BCMA × CD3 | 2653 | CD28 antibody | | IL2 |
| | Beads | | | beads | | |
| 36 | REC-1 | BCMA × CD3 | 2654 | CD28 antibody | | IL2 |
| 37 | U266 | BCMA × CD3 | 2655 | Utomilumab | | IL2 + IL7 |
| 38 | REC-1 | BCMA × CD3 | 2653 | CD19 × CD28 | 2702 | IL15 + IL7 |
| 39 | REC-1 | BCMA × CD3 | 2654 | CD20 × 41BB | 2774 | IL2 |
| 40 | U266 | BCMA × CD3 | 2655 | BCMA × CD28 | 2710 | IL2 |
| 41 | U266 | BCMA × CD3 | 2653 | BCMA × 41BB | 2766 | IL2 + IL7 |
| 42 | REC-1 | BCMA × CD3 | 2654 | BCMA × CD28 | 2709 | IL15 + IL7 |
| 43 | REC-1 | BCMA × CD3 | 2655 | BCMA × 41BB | 2765 | IL2 |
| 44 | REC-1 | BCMA × CD3 | | BCMA × CD28 | 2709 | IL2 |
| | | DART | | | | |
| 45 | REC-1 | BCMA × CD3 | | BCMA × 41BB | 2765 | IL2 |
| | | DART | | | | |
| 46 | EGFR-ECD- | EGFR × CD3 | 2814 | CD28 antibody | | IL2 |
| | Beads | | | beads | | |
| 47 | Hela | EGFR × CD3 | 2814 | CD28 antibody | | IL2 |
| 48 | Hela | EGFR × CD3 | 2814 | Utomilumab | | IL2 + IL7 |
| 49 | Hela | EGFR × CD3 | 2814 | EGFR × CD28 | 2815 | IL15 + IL7 |
| 50 | Hela | EGFR × CD3 | 2814 | EGFR × 41BB | 2816 | IL2 |
| 51 | A431 | EGFR × CD3 | 2814 | EGFR × CD28 | 2710 | IL2 |
| 52 | FITC-Beads | FITC × CD3 | 2817 | CD28 beads | | IL2 |
| 53 | FITC-Beads | FITC × CD3 | 2817 | CD28 antibody | | IL2 |
| 54 | FITC-Beads | FITC × CD3 | 2817 | Utomilumab | | IL2 + IL7 |
| 55 | FITC-Beads | FITC × CD3 | 2817 | FITC × CD28 | 2818 | IL15 + IL7 |
| 56 | FITC-Beads | FITC × CD3 | 2817 | FITC × 41BB | 2819 | IL2 |
| 57 | STREPTA | STREPTAG × | 2820 | CD28 beads | | IL2 |
| | G-Beads | CD3 | | | | |
| 58 | STREPTA | STREPTAG × | 2820 | CD28 antibody | | IL2 |
| | G-Beads | CD3 | | | | |
| 59 | STREPTA | STREPTAG × | 2820 | Utomilumab | | IL2 + IL7 |
| | G-Beads | CD3 | | | | |
| 60 | STREPTA | STREPTAG × | 2820 | STREPTAG × | 2821 | IL15 + IL7 |
| | G-Beads | CD3 | | CD28 | | |
| 61 | Hela- | STREPTAG × | 2820 | STREPTAG × | 2852 | IL2 |
| | STREPTA | CD3 | | 41BB | | |
| | G-EGFR | | | | | |

[0797] Use of Blinatumomab and/or Other T Cell Bispecific Antibodies and/or Costimulatory Molecules (e.g., 41BB Ligand or Utomilumab) for Activation and Expansion of T Cells In Vivo

[0798] A leukapheresis product is collected from a patient with metastatic ovarian cancer expressing Mesothelin. Selection of CD3-positive T lymphocytes is performed using the CliniMACS Prodigy® System from Miltenyi Biotec and following the manufacturer's recommendations. Approximately 10⁸ to 10⁸ T cells are transduced with a lentiviral encoding a Mesothlin CAR (e.g., SEQ ID NO: 2832). The CAR-T cells are expanded for 14-21 days in a closed system using CD3/CD28 beads. The resulting cell products undergoes quality control testing (including sterility and tumor specific cytotoxicity tests). Patient optionally receives lymphodelpeting chemotherapy prior to receving the infusion of CAR-T cells. An exemplary lymphodepleting chemotherapy regimens includes 30 mg/m²/day i.v. fludarabine plus 500 mg/m²/day cyclophosphamide i.v. x 3 days. An alternate regimen includes Cyclophosphamide at a dose of 60 mg/kg/day IV on Day −7 and Day −6 followed by Fludarabine 25 mg/m²/day IVPB on Day −5 through Day −1. Another alternate regimen is Cyclophosphamide 1000 mg/m². If the lymphodepleting chemotherapy is administered, then the CAR-T cells are infused 1 day after completion of lymphodepleting chemotherapy. Otherwise, CAR-T cells are infused without prior chemotherapy. The CAR-T cell product is administered to the patient by intravenous infusion. The dose of CAR-T product varies from 1×10⁴ CAR+ve CD3 cells/kg to 5×10¹ CAR+ve CD3 cells/kg. Within 3 hours of infusion of CAR-T cells, the patient is administered Blinatumomab. The initial dose of Blinatunomab is 9 μg/day by continuous intravenous infusion for the first 7 day s of treatment and then escalated to 28 μg/day by continuous intravenous infusion starting on Day 8 (Week 2) through Day 29 (Week 41 Optionally, Interleukin (IL)-2 is administered subcutaneously at a dose of 250000 IU/kg once daily for a maximum of 21 doses, with the first dose administered within 3 hours of infusion of CAR-T cell product. Optionally, utomilumab is administered at dose of 0.6 to 10 mg/kg every 4 weeks intravenously. Infusion of Blinatumomab is stopped in case patient shows any signs of toxicity, including symptoms and signs suggestive of cytokine release syndrome or neurotoxicity

[0799] Example: Use of Perixafor Mobilized T Cells for Manufacturing of TCR/CAR-T Cell Product and Use of Blinatumomab for In Vivo Expansion of the TCR/CAR T Cell Product.

[0800] A patient (HLA-A2) with multiple myeloma receives Perixafor at a dose of 0.24 mg/kg subcutaneously daily for 3 days. A leukapheresis product is collected from a patient 6 h after the last dose of Perixafor. Selection of CD3-positive T lymphocytes is performed using the CliniMACS Prodigy® System from Miltenyi Biotec and following the manufacturer's recommendations. Approximately 10⁸ to 10⁸ T cells are transduced with a lentiviral encoding a NY-ESO-1 T Cell Receptor (SEQ ID NO: 2836) and engineered T Cell product are expanded using CD3/CD28 beads according to methods known in the art. The resulting cell products undergoes quality control testing (including sterility and tumor specific cytotoxicity tests). The TCR-T cell product is administered to the patient by intravenous infusion. The dose of TCR-T product varies from 1×10⁴ NY-ESO-1 TCR+ve CD3 cells/kg to NY-ESO-1 TCR 5×10⁹ CAR+ve CD3 cells/kg. Blinatumomab (100 ng/10⁶ cells) is added to the bag containing the NY-ESO T Cell Receptor Engineered T Cell product, the products are mixed on a rocking platform for 15 minutes and then infused into the patient. The patient also receives an infusion of Blinatumomab within 5 minutes after completion of infusion of NY-ESO TCR engineered T cell product. The initial dose of Blinatumomab is 9 μg/day by continuous intravenous infusion for the first 7 days of treatment and then escalated to 28 μg/day by continuous intravenous infusion starting on Day 8 (Week 2) through Day 29 (Week 4). Essentially a similar procedure is used to treat patients with synovial sarcoma, myxoid round cell liposarcoma, melanoma, NSCLC and ovarian cancer using the NY-ESO TCR product.

[0801] Essentially a similar procedure is used to treat patients with acute myeloid leukemia with a WT1-expressing AML using a recombinant WT1 targeted TCR engineered T cell product. Essentially a similar approach can be used to treat other diseases using Perixafor-mobilized immune cells (e.g., T cells) that have been engineered to express a CAR (e.g., a Mesothelin CAR, SEQ ID NO: 2832; a IL13Ra2 CAR, SEQ ID NO:2829; Her2 CAR, SEQ ID NO: 2831; AFP/MHC CAR, SEQ ID NO: 2835) or a TCR where the CAR or the TCR targets an antigen or antigens expressed on the disease causing or disease-associated cells. The method can be also used for adoptive cellular therapy involving Tumor Infiltrating lymphocytes (TIL) and/or with T cell vaccination approaches.

[0802] Use of TRAIL Antagonists and Bispecific T Cell Engagers for Manufacturing of CAR-T Cell Products

[0803] Buffy coat cells are obtained from healthy de-identified adult donors from the Blood Bank and used to isolate peripheral blood mononuclear cells (PBMC) by Ficoll-Hypaque gradient centrifugation. PBMC are either used as such or used to isolate T cells using CD3 magnetic microbeads (Miltenyi Biotech) and following the manufacturer's instructions. PBMC or isolated T cells are re-suspended in XVIVO medium (Lonza) supplanted with 10 ng/ml CD3 antibody, 10 ng/ml CD28 antibody and 100 IU recombinant human-IL2. Optionally, TRAIL antagonists MAB375-SP, DR5-Fc or DR4-Fc are added at concentration of 50 ng/ml each, either singly or in combination. Cells are cultured at 37° C., in a 5% CO₂ humidified incubator. Cells are activated in the above medium for 1 day prior to infection with a lentiviral vector encoding a CAR targeting CD19 (e.g., SEQ ID NO: 2822). In general, primary cells (e.g. T cells) are infected in the morning using spin-infection (1800 rpm for 90 minutes at 37° C. with 300 μl of concentrated virus that has been re-suspended in XVIVO medium in the presence of 8 μg/ml of Polybrene® (Sigma, Catalog no. H9268). The media is changed in the evening and the infection is repeated for two more days for a total of 3 infections. After the 3rd infection, the cells are pelleted and resuspended at concentration of 5×10⁵ cells/ml in fresh XVIVO media containing BCMA x CD3 bispecific antibody (SEQ ID NO: 2653) at 10 ng/ml plus irradiated (100 Gy) REC-1 cells (5×10⁶ cells/ml) and 50 IU recombinant human-IL2. Cells are cultured in the above medium for 10-15 days. Optionally, TRAIL antagonists MAB375-SP, DR5-Fc or DR4-Fc are added at concentration of 50 ng/ml each, either singly or in combination. Culture media is supplemented with fresh REC-1 cells, BCMA x CD3 BiTE and IL2 every 3-4 days. Robust expansion of cells is achieved upon culture in the presence of REC-1 cells and bispecific antibodies. Essentially a similar procedure as described above is used for infection with CAR-encoding retroviruses. In an alternate embodiment, the BCMA x CD3 BiTE is replaced by Blinatumomab at 10 ng/ml

[0804] TRAIL Neutralizing Antibody Blocks IL1α Production by CAR-T Cells when Cultured with THP-1 Cells.

[0805] T cells isolated from mononuclear cells using CD3 magnetic microbeads (Miltenyi Biotech) are stimulated with CD3 antibody (10 ng/ml) and CD28 antibody (10 ng/ml) in the presence of IL2 (30 IU) for 24 hours and then infected with a lentiviral vector encoding a chimeric antigen receptor targeting CD19 (GV8) and co-expressing EGFP (Enhanced Green Fluorescent Protein) or a control vector encoding EGFP alone. Cells were expanded in XVIVO medium (Lonza) supplanted with 10 ng/ml CD3 antibody, 10 ng/ml CD28 antibody and 30 IU recombinant human-IL2 and used in the following experiments:

[0806] THP-1 cells (Monocytic Leukemia) were plated in 24-well plate at a density of 10⁶ cells/well and were either left untreated, or treated with PMA 50 ng/ml (to induced macrophage differentiation) or PMA 50 ng/ml+TRAIL antibody (MAB375-SP 20 ng/ml). Plates were incubated overnight for THP1 cells to differentiate. In another 24-well plate Bv173-hGLuc (3 million cells/well/500 μl) were co-cultured with either T-vector (3×10⁶ cells/well/500 μl) cells or T-CD19-CAR cells (3×10⁶ cells/well/500 μl) at an E:T ratio of 1:10 for 24 h. Next day, supernatant was collected from Bv173+ T cells and added on top of THP-1 cells that had been plated in a separate 24-well plate one day earlier. THP1 cells were cultured in the presence of supernatant for 72 h and cells were collected, centrifuged and supernatant was tested for IL1α and IL6 production by ELISA. The FIG. 3 shows inhibition of PMA-induced macrophage differentiation of THP1 cells is accompanied by increase in IL1α production which is blocked by TRAIL antibody. The TRAIL antibody also has a modest inhibitory effect on IL1α production when supernatant from T cells, including CAR-T cells, is incubated with TPA-differentiated THP1 cells.

[0807] AIL Antibody Blocks IL1-Alpha Production by THP1 Cells when Co-Cultured with CAR-T Cells

[0808] T cells isolated from mononuclear cells using CD3 magnetic microbeads (Miltenyi Biotech) are stimulated with CD3 antibody (10 ng/ml) and CD28 antibody (10 ng/ml) in the presence of IL2 (30 IU) for 24 hours and then infected with a lentiviral vector encoding a chimeric antigen receptor targeting CD19 (GV8) and co-expressing EGFP (Enhanced Green Fluorescent Protein) or a control vector encoding EGFP alone. Cells are expanded in XVIVO medium (Lonza) supplanted with 10 ng/ml CD3 antibody, 10 ng/ml CD28 antibody and 30 IU recombinant human-IL2.

[0809] THP1 cells were plated in a 24-well plate at 1.5×10⁵ cells per well either alone or with CD19+ Bv173 (at 2.5×10⁵ cells per well) and/or T-vector cells or T-cells expressing a CAR (GV8) directed against CD19 (25K cells per well) with or without a TRAIL antibody MAB375-SP (R&D Systems) added at concentrations of 12 ng/ml or 20 ng/ml. The E:T ratio of T cells to BV173 cells was 1:10. Supernatant was collected after 48 hours of co-culture and 25 μl of supernatant was assayed per well in triplicate for IL1-alpha and IL6-using a Duel-Set ELISA kit (R&D systems).

[0810] FIG. 4 shows that treatment with the TRAIL antibody significantly blocks IL1α production by THP1 cells when co-cultured with T cells expressing a CD19 CAR (GV8) plus BV173 target cells.

[0811] TRAIL Antibody Blocks IL1-Alpha Production by PMA-Differentiated THP1 Cells when Co-Cultured with CAR-T Cells

[0812] T cells isolated from mononuclear cells using CD3 magnetic microbeads (Miltenyi Biotech) are stimulated with CD3 antibody (10 ng/ml) and CD28 antibody (10 ng/ml) in the presence of IL2 (30 IU) for 24 hours and then infected with a lentiviral vector encoding a chimeric antigen receptor targeting CD19 (GV8) and co-expressing EGFP (Enhanced Green Fluorescent Protein) or a control vector encoding EGFP alone. Cells are expanded in XVIVO medium (Lonza) supplanted with 10 ng/ml CD3 antibody, 10 ng/ml CD28 antibody and 30 IU recombinant human-IL2.

[0813] THP1 (6 million) cells were plated in a 6-well plate and treated with 50 ng/ml PMA for 24 hours. Next day, cells were treated with PBS-EDTA to detach the cells, given a wash to remove PMA and washed cells were plated in a 24-well plate at 1.5×10⁵ cells per well either alone or with CD19+ Bv173 (2.5×10⁵ cells per well) and/or T-Parental cells or T-cells expressing a CAR (GV8) directed against CD19 (2.5×10⁴ cells per well) with or without a TRAIL antibody MAB375-SP (R&D Systems) added at concentrations of 12 ng/ml or 20 ng/ml. The E:T ratio of T cells to BV173 cells was 1:10. Supernatant was collected after 48 hours of co-culture and 25 μl of supernatant was assayed per well in triplicate for IL1-alpha and IL6-using a Duel-Set ELISA kit (R&D systems).

[0814] The FIG. 5 shows that treatment with TRAIL antibody blocks IL1α production by PMA-differentiated THP cells (mTHP1), mTHP1 cells co-cultured with BV173 cells, mTHP1 cells cocultured with T-vector cells and mTHP1 cells cocultered with CD19-CAR-T cells plus BV173 cells. Thus, TRAIL is a major mediator of T cells-induced (including CAR-T cells-induced) IL1α production by monocytes/macrophages cells. Since IL1α production by monocytes/macrophage lineage cells is believed to be a major mediator of cytokine release syndrome and neurotoxicity associated with administration of adoptively transferred T cells, including CAR-T and TCR-T cells, these results demonstrate that TRAIL inhibitors (e.g., TRAIL antibody, DR5-Fc, DR4-Fc, DcR1-Fc, DcR2-Fc, antagonist DR5 antibodies, small molecule and nucleic acid inhibitors of TRAIL/DR5 signaling) can be used for the prevention and treatment of CRS and neurotoxicity associated with administration of adoptively transferred T cells.

[0815] Use of a Neutralizing TRAIL Antibody to Prevent Cytokine Release Syndrome and Neurotoxicity

[0816] A patient with Acute Lymphocytic Leukemia receives a CD19-CAR-T cell product (5×10⁸ CAR+ve CD3 cells/kg). Patient is at high risk of developing CRS and neurotoxicity due to high leukemia burden. On day after administration of CAR-T cells, patient is given a prophylactic dose of clinical-grade neutralizing antibody against TRAIL (MAB375-SP) at dose of 5 mg/kg by intravenous infusion following pre-medication with Benadryl (50 mg i.v.) and Paracetamol (750 mg PO). The dose is repeated after 1 week. In an alternate example, a patient with multiple myeloma receives a BCMA-CAR-T cell product (5×10⁸ CAR+ve CD3 cells/kg). Patient is given a prophylactic dose of clinical-grade neutralizing antibody against TRAIL (MAB375-SP) at dose of 5 mg/kg by intravenous infusion following pre-medication with Benadryl (50 mg i.v.) and Paracetamol (750 mg PO).

[0817] Use of a Neutralizing TRAIL Antibody to Treat Cytokine Release Syndrome and Neurotoxicity

[0818] A patient with Acute Lymphocytic Leukemia receives a CD19-CAR-T cell product. Three days after infusion, patient develops signs and symptoms suggestive of Cytokine Release syndrome and neurotoxicity, including high fever, hypotension, respiratory distress and altered mental status. Patient is administered a clinical grade neutralizing antibody against TRAIL (MAB375-SP) at dose of 5 mg/kg by intravenous infusion after pre-medication with Benadryl (50 mg i.v.) and Paracetamol (750 mg PO). A second dose of the neutralizing antibody against TRAIL is administered after 12 hours.

[0819] Use of DR5-Fc to Prevent Cytokine Release Syndrome and Neurotoxicity

[0820] A patient with Acute Lymphocytic Leukemia receives a CD19-CAR-T cell product. Patient is at high risk of developing CRS and neurotoxicity due to high leukemia burden. On day after administration of CAR-T cells, patient is given a prophylactic dose of clinical-grade DR5-Fc at dose of 5 mg/kg by intravenous infusion following pre-medication with Benadryl (50 mg i.v.) and Paracetamol (750 mg PO). The dose is repeated after 1 week. In an alternate example, a with multiple myeloma receives a BCMA-CAR-T cell product. Patient is given a prophylactic dose of clinical-grade neutralizing antibody against TRAIL (MAB375-SP) at dose of 5 mg/kg by intravenous infusion following pre-medication with Benadryl (50 mg i.v.) and Paracetamol (750 mg PO). In an alternate embodiment, the patient is administered other TRAIL antagonists (e.g, DR4-Fc, DcR1-Fc and DcR2-Fc) instead of or in combination with DR5-Fc.

[0821] Use of DR5-Fc to Treat Cytokine Release Syndrome and Neurotoxicity

[0822] A patient with Acute Lymphocytic Leukemia receives a CD19-CAR-T cell product. Three days after infusion, patient develops signs and symptoms suggestive of Cytokine Release syndrome and neurotoxicity, including high fever, hypotension, respiratory distress and altered mental status. Patient is administered a clinical grade DR5-Fc at dose of 5 mg/kg by intravenous infusion after pre-medication with Benadryl (50 mg i.v.) and Paracetamol (750 mg PO). A second dose of DR5-Fc is administered after 12 hours. In an alternate embodiment, the patient is administered other TRAIL antagonists (e.g, DR4-Fc, DcR1-Fc and DcR2-Fc) instead of or in combination with DR5-Fc.

[0823] Use of Intra-Thecal MAB375-SP to Treat Neurotoxicity

[0824] A patient with Acute Lymphocytic Leukemia receives a CD22-CAR-T cell product. Ten days after infusion of CAR-T cells, patient develops signs and symptoms suggestive of neurotoxicity, including confusion, aphasia, altered mental status and seizures. Patient is administered a clinical grade neutralizing antibody against TRAIL (MAB375-SP) at dose of 20 mg (resuspended in 2 ml of normal saline) by intra-thecal injection. A second dose of intra-thecal MAB375 is administered after 3 days.

[0825] Use of Intra-Thecal DR5-Fc to Treat Neurotoxicity

[0826] A patient with multiple myeloma receives a BCMA-CAR-T cell product. Ten days after infusion of CAR-T cells, patient develops signs and symptoms suggestive of neurotoxicity, including confusion, aphasia, altered mental status and seizures. Patient is administered a clinical grade neutralizing DR5-Fc at dose of 20 mg (resuspended in 2 ml of normal saline) by intra-thecal injection. A second dose of intra-thecal DR5-Fc is administered after 3 days. In an alternate embodiment, the patient is administered other TRAIL antagonists (e.g, DR4-Fc, DcRT-Fc and DcR2-Fc) instead of or in combination with DR5-Fc.

[0827] Use of TRAIL Antagonist in the Manufacturing of Cellular Therapy Products

[0828] Buffy coat cells are obtained from healthy de-identified adult donors from the Blood Bank and used to isolate peripheral blood mononuclear cells (PBMC) by Ficoll-Hypaque gradient centrifugation. PBMC are either used as such or used to isolate T cells using CD3 magnetic microbeads (Miltenyi Biotech) and following the manufacturer's instructions. PBMC or isolated T cells are re-suspended in XVIVO medium (Lonza) supplanted with 10 ng/ml CD3 antibody, 10 ng/ml CD28 antibody and 100 IU recombinant human-IL2. Cells are cultured at 37° C., in a 5% CO2 humidified incubator. Cells are activated in the above medium for 1 day prior to infection with a lentiviral vector encoding a CAR or a TCR (e.g., SEQ ID NO: 2822 to 2836). After the infection, the cells are pelleted and resuspended at concentration of 5×10⁵ cells/ml in fresh XVIVO media containing 10 ng/ml CD3 antibody, 10 ng/ml CD28 antibody, 50 IU recombinant human-IL2. The following TRAIL antagonists are added either singly or in various combinations i) MAB375-SP at 50 ng/ml, ii) recombinant DR5-Fc (Sigma-Aldrich; D9563) at 50 ng/ml; iii) recombinant DR4-Fc (Sigma-Aldrich; D9438) at 50 ng/ml; iv) Recombinant Human TRAIL R3/TNFRSF10C Fc Chimera Protein (R&D Systems) at 50 ng/ml; and v) DcR2-Fc at 50 ng/ml. Cells are cultured at 37° C., in a 5% CO2 humidified incubator. Cells are cultured in the above medium for 10-27 days with change of medium and addition of fresh TRAIL antagonists every 2-3 days. At the end of culture medium, the T cells are collected, washed with normal saline and resuspended in normal saline and used for in vivo studies in mice. T cells cultured in the presence of TRAIL antagonists are shown to possess robust anti-tumor activity and long term persistence in vivo when tested in appropriate model in NSG mice consisting of xenograft of human tumor cells expressing the antigen targeted by the CAR or TCR constructs. Essentially a similar procedure is used to manufacture CAR-T cells for human clinical trials.

[0829] Expression of TRAIL Antagonists in the T Cells

[0830] Buffy coat cells are obtained from healthy de-identified adult donors from the Blood Bank and used to isolate peripheral blood mononuclear cells (PBMC) by Ficoll-Hypaque gradient centrifugation. PBMC are either used as such or used to isolate T cells using CD3 magnetic microbeads (Miltenyi Biotech) and following the manufacturer's instructions. PBMC or isolated T cells are re-suspended in XVIVO medium (Lonza) supplanted with 10 ng/ml CD3 antibody, 10 ng/ml CD28 antibody and 100 IU recombinant human-IL2. Cells are cultured at 37° C., in a 5% CO2 humidified incubator. Cells are activated in the above medium for 1 day prior to infection with a lentiviral vector expressing a cassette encoding a CAR or a TCR either alone or co-expressing a TRAIL antagonist (e.g, DR5-Fc, DR4-Fc, DcR1-Fc, DcR2-Fc and chimeric fusion proteins encoding the extracellular TRAIL binding domain linked to the cytosolic domain of a different signaling receptor via a transmembrane domain). The SEQ ID NO: of the exemplary expression constructs targeting CD19 (using FMC63 antigen binding domain) and NYESO-1/MHC I or II complex and co-expressing TRAIL antagonists are provided in Table 7a in SEQ ID NO: 2853-2863; 2865-2875; 2877-2887; 2889-2899; 2901-2911; 2913-2923; 2925-2935. After the infection, the cells are pelleted and resuspended at concentration of 5×10⁵ cells/ml in fresh XVIVO media containing 10 ng/ml CD3 antibody, 10 ng/ml CD28 antibody, 50 IU recombinant human-IL2. Cells are used expanded in the above medium for 14 days and then used for in vitro studies to determine their phenotype (e.g., expression of exhaustion and activation markers), cytokine production (e.g., IL1α, IL1P, TNFα, IFNγ and IL6), proliferative potential, cytotoxicity (e.g. using Matador assay) using appropriate cell line models. NALM6 and REC-1 cells are used as the target cells for FMC63 based constructs, while MEL624 cell lines is used for NYESO-1/HLA-A2 complex targeting constructs. The in vivo activity of the T cells expressing the CAR/TCR and co-expressing the TRAIL antagonist is confirmed using xenograft of appropriate cell lines (e.g., NALM6 and MEL624) expressing their target antigens in immunodeficient mice (e.g., NSG mice). In addition, effect of the CAR/TCR coexpressing the TRAIL antagonists on development of cytokine release syndrome is tested using the SCID-Biege mouse model of CRS as decribed by Giavridis, T et al (Nat Med. 2018 June; 24(6):731-738. doi: 10.1038/s41591-018-0041-7; PMID: 29808005). Finally, the CAR-T and NYESO/HLA-A2 TCR-T cell products are administered to patients enrolled in a clinical trial to test the safety and efficacy of CAR/TCR products coexpressing TRAIL antagonists for the treatment of CD19+ B cell malignancies (for FMC63 based constructs) and NYESO-1/HLA-A2 expressing melanomas (for NYESO-1/HLA-A2 targeting constructs), respectively.

[0831] Use of T Cells Expressing the Costimulatory Molecules (e.g., DcR1, DcR2, CD27, CD28, 41BB, OX40 and GITR)

[0832] A clinical trial is conducted to test the safety and efficacy of T cells expressing different costimulatory molecules in subjects with cancer. The cancer tissue (e.g., a biopsy of lung cancer, ovarian, colon cancer or lymphoma etc.) is obtained from the subject and then subjected to gene expression analysis by RNA-SEQ and/or microarray and protein analysis by histochemistry and/or flow cytometry to analyze the expression of different ligands (e.g., TRAIL, CD70, CD80, CD84, 41BBL, OX40L and GITRL) of the costimulatory receptors (e.g., DcR1, DcR2, CD27, CD28, 4TBB1, OX40 and GITR). Subsequently, CAR-T cells are generated targeting an antigen expressed on the tumor cells and co-expressing a co-stimulatory receptor whose ligand is expressed or overexpressed in the cancer tissue. For example, for a patient with CD20-expressing lymphoma overexpressing TRAIL, a CD19-CAR-T cell product is manufactured that also co-expresses DcRT or DcR2. In another exemplary embodiment, for a patient with Mesothelin-expres sing ovarian cancer overexpressing 4TBB1L, a mesothelin CAR-T cell product is generated that co-expresses 4TBB1. Table 18 provides an example where the expression of different ligands in the diseased tissue, e.g., cancer cell or tissue, is matched by expressing the corresponding co-stimulatory receptor in the immune cells, e.g, T cells, e.g., CAR-T cells or TCR-T cells or TILs.

TABLE 18

| | | Costimualtory | Costimualtory |
|---|---|---|---|
| | | Molecule | Molecule |
| Antigen Expressed in | Costimulatory molecule to | SEQ ID NO | SEQ ID NO |
| Disease Cell or Tissue | be expressed in Immune Cell | (DNA) | (PRT) |
| TRAIL | DcR1 | 2250 | 2360 |
| TRAIL | DcR2 | 2251 | 2361 |
| TRAIL | DR5-SP-ECD-TM-CD27-CP | 2319 | 2429 |
| TRAIL | DR5-SP-ECD-TM-CD28-CP | 2320 | 2430 |
| TRAIL | DR5-SP-ECD-TM-41BB-CP | 2321 | 2431 |
| TRAIL | DR5-SP-ECD-TM-OX40-CP | 2322 | 2432 |
| TRAIL | DR5-SP-ECD-TM-GITR-CP | 2323 | 2433 |
| TRAIL | DR5-SP-ECD-TM-BCMA-CP | 2324 | 2434 |
| TRAIL | DR4-SP-ECD-CD27-TM-CP | 2332 | 2442 |
| TRAIL | DR4-SP-ECD-CD28-TM-CP | 2333 | 2443 |
| TRAIL | DR4-SP-ECD-41BB-TM-CP | 2334 | 2444 |
| TRAIL | DR4-SP-ECD-OX40-TM-CP | 2335 | 2445 |
| TRAIL | DR4-SP-ECD-GITR-TM-CP | 2336 | 2446 |
| TRAIL | DR4-SP-ECD-BCMA-TM-CP | 2337 | 2447 |
| TRAIL | DcR1-SP-ECD-CD27-TM-CP | 2339 | 2449 |
| TRAIL | DcR1-SP-ECD-CD28-TM-CP | 2340 | 2450 |
| TRAIL | DcR1-SP-ECD-41BB-TM-CP | 2341 | 2451 |
| TRAIL | DcR1-SP-ECD-OX40-TM-CP | 2342 | 2452 |
| TRAIL | DcR1-SP-ECD-GITR-TM-CP | 2343 | 2453 |
| TRAIL | DcR1-SP-ECD-BCMA-TM-CP | 2344 | 2454 |
| TRAIL | DcR2-SP-ECD-CD27-TM-CP | 2346 | 2456 |
| TRAIL | DcR2-SP-ECD-CD28-TM-CP | 2347 | 2457 |
| TRAIL | DcR2-SP-ECD-41BB-TM-CP | 2348 | 2458 |
| TRAIL | DcR2-SP-ECD-OX40-TM-CP | 2349 | 2459 |
| TRAIL | DcR2-SP-ECD-GITR-TM-CP | 2350 | 2460 |
| TRAIL | DcR2-SP-ECD-BCMA-TM-CP | 2351 | 2461 |
| CD70 | CD27 | 2254 | 2364 |
| 41BBL | 41BB | 2256 | 2366 |
| CD80 | CD28 | 2255 | 2365 |
| CD86 | CD28 | 2255 | 2365 |
| OX40L(CD252) | OX40 | 2257 | 2367 |
| GITR Ligand/TNFSF18 | GITR/TNFRSF18 | 2258 | 2368 |
| TNFSF13B/TALL-1/BAFF | BCMA | 2259 | 2369 |

[0833] The SEQ ID NO: of the nucleic acids and polypeptides encoding exemplary costimulatory molecules are provided in Table 1 (SEQ ID NO: 2250-2259 and SEQ ID NO: 2360-2368). Other co-stimulatory molecules are known in the art and can be used in alternate embodiment of the disclosure. The co-stimulatory molecules are expressed in the T cell product either using the same vector as being used to express the CAR/TCR module or using a separate vector. In certain embodiments, the costimulatory molecule is expressed in T cells (e.g, TILs) without expression of a CAR or an exogenous TCR. Essentially a similar approach is used to match any immune therapy product (e.g. T cell, NK cell, Macrophage) to a diseased cell or tissue (e.g., cancer) by ectopically expressing a receptor in the immune cell whose ligand is expressed or overexpressed in the diseased cell or tissue. It is expected that the immune cells that are engineered to ectopically express or overexpress one or more of the co-stimulatory receptors show better infiltration into the diseased tissue, e.g., cancer, and long-term persistence as compared to the control immune cells, e.g., immune cells that have not been engineered to ectopically express or overexpress the co-stimulatory receptors. Furthermore, it is expected that immune cells that are engineered to ectopically express or overexpress one or more of the co-stimulatory receptors whose ligands are expressed or overexpressed in the diseased tissue/cells, e.g., cancer or cancer cells, show better infiltration into the diseased tissue, e.g., cancer, and long-term persistence as compared to the control immune cells, e.g., immune cells that have not been engineered to ectopically express or overexpress the co-stimulatory receptors.

[0834] Use of Immune Effector Cell Therapy in Combination with Intratumoral Injection of K13, Nemo-K277A and IKK2-S177E-S181E

[0835] A patient with mesothelin expressing ovarian cancer, receives intratumoral delivery of a mammalian expression vector encoding nucleic acid encoding vFLIP K13, NEMO-K277A and/or IKK2-S177E-S181E by electroporation using methods known in the art followed 2 day later by infusion of 5×10⁸ Mesothelin-targeted CAR-T cells. Intratumoral expression of vFLIP K13, NEMO-K277A and/or IKK2-S177E-S181E is shown to stimulate immune cell infiltration into the tumor, including CAR-T cells. Essentially a similar procedure is used to enhance infiltration into the tumor tissue of immune effector cells engineered to express a NY-ESO-1 TCR.

[0836] Use of a Neutralizing TRAIL Antibody and DR5-Fc to Treat Immune Disorders, Such as Rheumatoid Arthritis, Systemic-Onset Juvenile Idiopathic Arthritis, Still's Disease, Macrophage Activation Syndrome, Hemophagocytic Lymphohistiocytosis (HLH), Systemic Lupus Erythematosus (SLE), Kawasaki Disease, and Inflammatory Bowel Disease.

[0837] A clinical trial is conducted to test a neutralizing TRAIL antibody (MAB375-SP) or DR5-Fc in patients with immune disorders, such as Rheumatoid Arthritis, Systemic-onset juvenile idiopathic arthritis, Still's disease, Macrophage activation syndrome, Hemophagocytic lymphohistiocytosis (HLH), systemic lupus erythematosus (SLE), Kawasaki disease, and inflammatory bowel disease Eligibility criteria for the trial include prior diagnosis of the above disorders and laboratory and clinical evidence of disease activity at study entry. Baseline clinical and laboratory measures of disease activity are obtained. Patients are randomized to receive a placebo, MAB375-SP or DR5-Fc. Patiens randomized to the MAB375-SP or DR5-Fc arms are administered a clinical grade neutralizing antibody against TRAIL (MAB375-SP) or DR5-Fc at dose of 5 mg/kg by intravenous infusion every week after pre-medication with Benadryl (50 mg i.v.) and Paracetamol (750 mg PO). Response to treatment is evaluated after 4 doses based on established clinical and laboratory measures of activity of the different diseases.

[0838] Use of a Neutralizing TRAIL Antibody and DR5-Fc to Prevent Flare of Immune Disorders, Such as Rheumatoid Arthritis, Systemic-Onset Juvenile Idiopathic Arthritis, Still's Disease, Macrophage Activation Syndrome, Hemophagocytic Lymphohistiocytosis (HLH), Systemic Lupus Erythematosus (SLE), Kawasaki Disease, and Inflammatory Bowel Disease.

[0839] A clinical trial is conducted to test a clinical-grade neutralizing TRAIL antibody (MAB375-SP) and DR5-Fc for prevention of flare or disease reactivation in patients with immune disorders, such as Rheumatoid Arthritis, Systemic-onset juvenile idiopathic arthritis, Still's disease, Macrophage activation syndrome, Hemophagocytic lymphohistiocytosis (HLH), systemic lupus erythematosus (SLE), Kawasaki disease, and inflammatory bowel disease Eligibility criteria for the trial include prior diagnosis of the above disorders and no active laboratory and/or clinical evidence of ongoing disease activity at study entry. Baseline clinical and laboratory measures of disease activity are obtained. Patients are randomized to receive a placebo, MAB375-SP or DR5-Fc. Patiens randomized to the MAB375-SP or DR5-Fc arms are administered a clinical grade neutralizing antibody against TRAIL (MAB375-SP) or DR5-Fc at dose of 5 mg/kg by intravenous infusion every week after pre-medication with Benadryl (50 mg i.v.) and Paracetamol (750 mg PO). Prevention of disease recurrence is evaluated after 3 and 6 months based on established clinical and laboratory measures of activity of the different diseases.

[0840] All publications and patents mentioned in the above specification are herein incorporated by reference. Various modifications and variations of the described method and system of the disclosure will be apparent to those skilled in the art without departing from the scope and spirit of the disclosure. Although the disclosure has been described in connection with specific preferred embodiments, it should be understood that the disclosure as claimed should not be unduly limited to such specific embodiments. Indeed, various modifications of the described modes for carrying out the disclosure that are obvious to those skilled relevant fields are intended to be within the scope of the following claims.

[0841] The disclosures of each and every patent, patent application, and publication cited herein are hereby incorporated herein by reference in their entirety. While this invention has been disclosed with reference to specific aspects, it is apparent that other aspects and variations of this invention may be devised by others skilled in the art without departing from the true spirit and scope of the invention. The appended claims are intended to be construed to include all such aspects and equivalent variations.

1. A method of manufacturing an immune effector cell therapy product comprising treating a donor subject with:
(a) a CXCR4 antagonist;
(b) a cytokine;
(c) a chemotherapeutic agent;
(d) a beta2 adrenergic agonist;
(e) a Src kinase inhibitor;
(f) exercise so as to reach a heart rate at least >25% higher than the heart rate at rest; or
(g) a combination of one or more of (a), (b), (c), (d), (e) or (f);
isolating blood from the donor subject;
isolating an immune effector cell or population thereof from the blood; and
optionally transforming the immune effector cell or population thereof with a heterologous polynucleotide to express or over express an endogenous or exogenous immune receptor, a chimeric antigen receptor (CAR) or a T cell receptor, wherein the immune receptor, CAR or T cell receptor comprises at least one antigen-binding domains and at least one transmembrane domain; or
optionally expanding the immune effector cell or population thereof in culture for a period of 1 to 30 days.

2. The method of claim 1, wherein the immune effector cell or population thereof has reduced, eliminated or altered expression and/or function of BRD9, EZH2, MLL2, MLL3, MLL4, methylcytosine dioxygenase genes (e.g., Tet1, Tet2, Tet3), ATM, CHEK, FBXW10, BCOR, FAT1, ASXL1, PHF6, SF3B1, YY1, CBFb, Runx1, EHMT2 (G9A), SMARCA4, CREBBP, PRDM1/BLIMP1 HDAC2, JAK1, JAK3, STAT5b, STAT3, IL2RG, CARD11, BRAF, CD27, CD28, 41BB, DcR1, DcR2, OX40, GITR, BCMA, TRAIL, DR4 and/or DR5.

3. The method of claim 1, wherein the antigen-binding domain binds to a tumor antigen selected from a group consisting of: CD5, CD19; CD123; CD22; CD30; CD171; CS-1 (also referred to as CD2 subset 1, CRACC, SLAMF7, CD319, and 19A24); C-type lectin-like molecule-1 (CLL-1 or CLECL1); CD33; epidermal growth factor receptor variant Ill (EGFRviii); ganglioside G2 (GD2); ganglioside GD3 (aNeu5Ac(2-8)aNeu5Ac(2-3)bDGalp(I-4)bDGlcp(I-I)Cer); TNF receptor family member B cell maturation (BCMA); Tn antigen ((Tn Ag) or (GalNAcα-Ser/Thr)); prostate-specific membrane antigen (PSMA); Receptor tyrosine kinase-like orphan receptor 1 (ROR1); FmsLike Tyrosine Kinase 3 (FLT3); Tumor-associated glycoprotein 72 (TAG72); CD38; CD44v6; a glycosylated CD43 epitope expressed on acute leukemia or lymphoma but not on hematopoietic progenitors; a glycosylated CD43 epitope expressed on non-hematopoietic cancers; Carcinoembryonic antigen (CEA); Epithelial cell adhesion molecule (EPCAM); B7H3 (CD276); KIT (CD117); Interleukin-13 receptor subunit alpha-2 (IL-13Ra2 or CD213A2); Mesothelin; Interleukin 11 receptor alpha (IL-IIRa); prostate stem cell antigen (PSCA); Protease Serine 21 (Testisin or PRSS21); vascular endothelial growth factor receptor 2 (VEGFR2); Lewis(Y) antigen; CD24; Platelet-derived growth factor receptor beta (PDGFR-beta); Stage-specific embryonic antigen-4 (SSEA-4); CD20/MS4A1; Folate receptor alpha; Receptor tyrosine-protein kinase ERBB2 (Her2/neu); Mucin 1, cell surface associated (MUC1); epidermal growth factor receptor (EGFR); neural cell adhesion molecule (NCAM); Prostase; prostatic acid phosphatase (PAP); elongation factor 2 mutated (ELF2M); Ephrin B2; fibroblast activation protein alpha (FAP); insulin-like growth factor 1 receptor (IGF-I receptor), carbonic anhydrase IX (CAIX); Proteasome (Prosome, Macropain) Subunit, Beta Type, 9 (LMP2); glycoprotein 100 (gp100); oncogene fusion protein consisting of breakpoint cluster region (BCR) and Abelson murine leukemia viral oncogene homolog 1 (Abl) (bcr-abl); tyrosinase; ephrin type-A receptor 2 (EphA2); Fucosyl GM1; sialyl Lewis adhesion molecule (sLe); ganglioside GM3 (aNeu5Ac(2-3)bDClalp(I-4)bDGlcp(I-1)Cer); transglutaminase 5 (TGS5); high molecular weight-melanomaassociated antigen (HMWMAA); o-acetyl-GD2 ganglioside (OAcGD2); tumor endothelial marker 1 (TEM1/CD248); tumor endothelial marker 7-related (TEM7R); claudin 6 (CLDN6); thyroid stimulating hormone receptor (TSHR); G protein coupled receptor class C group 5, member D (GPRC5D); chromosome X open reading frame 61 (CXORF61); CD97; CD179a; anaplastic lymphoma kinase (ALK); Polysialic acid; placenta-specific 1 (PLAC1); hexasaccharide portion of globoH glycoceramide (GloboH); mammary gland differentiation antigen (NY-BR-1); uroplakin 2 (UPK2); Hepatitis A virus cellular receptor 1 (HAVCR1); adrenoceptor beta 3 (ADRB3); pannexin 3 (PANX3); G protein-coupled receptor 20 (GPR20); lymphocyte antigen 6 complex, locus K 9 (LY6K); Olfactory receptor 51 E2 (OR51 E2); TCR Gamma Alternate Reading Frame Protein (TARP); Wilms tumor protein (WT1); Cancer/testis antigen 1 (NY-ESO-1); Cancer/testis antigen 2 (LAGE-1a); Melanoma-associated antigen 1 (MAGE-A1); ETS translocation-variant gene 6, located on chromosome 12p (ETV6-AML); sperm protein 17 (SPA17); X Antigen Family, Member IA (XAGEI); angiopoietin-binding cell surface receptor 2 (Tie 2); melanoma cancer testis antigen-1 (MAD-CT-1); melanoma cancer testis antigen-2 (MAD-CT-2); Fos-related antigen 1; tumor protein p53 (p53); p53 mutant; prostein; survivin; telomerase; prostate carcinoma tumor antigen-1 (PCT A-1 or Galectin 8); melanoma antigen recognized by T cells 1 (MelanA or MARTI); Rat sarcoma (Ras) mutant; human Telomerase reverse transcriptase (hTERT); sarcoma translocation breakpoints; melanoma inhibitor of apoptosis (ML-IAP); ERG (transmembrane protease, serine 2 (TMPRSS2) ETS fusion gene); N-Acetyl glucosaminyl-transferase V (NA17); paired box protein Pax-3 (PAX3); Androgen receptor; Cyclin BI; v-myc avian myelocytomatosis viral oncogene neuroblastoma derived homolog (MYCN); Ras Homolog Family Member C (RhoC); Tyrosinase-related protein 2 (TRP-2); Cytochrome P450 IB 1 (CYPIB 1); CCCTC-Binding Factor (Zinc Finger Protein)-Like (BORIS or Brother of the Regulator of Imprinted Sites), Squamous Cell Carcinoma Antigen Recognized By T Cells 3 (SART3); Paired box protein Pax-5 (PAX5); proacrosin binding protein sp32 (OY-TESI); lymphocyte-specific protein tyrosine kinase (LCK); A kinase anchor protein 4 (AKAP-4); synovial sarcoma, X breakpoint 2 (SSX2); Receptor for Advanced Glycation End products (RAGE-1); renal ubiquitous 1 (RUI); renal ubiquitous 2 (RU2); legumain; human papilloma virus E6 (HPV E6); human papilloma virus E7 (HPV E7); intestinal carboxyl esterase; heat shock protein 70-2 mutated (mut hsp70-2); CD79a; CD79b; CD72; Leukocyte-associated immunoglobulin-like receptor 1 (LAIRI); Fc fragment of IgA receptor (FCAR or CD89); Leukocyte immunoglobulin-like receptor subfamily A member 2 (LILRA2); CD300 molecule-like family memberf (CD300LF); C-type lectin domain family 12 member A (CLEC12A); bone marrow stromal cell antigen 2 (BST2); EGF-like module-containing mucin-like hormone receptor-like 2 (EMR2); lymphocyte antigen 75 (LY75); Glypican-3 (GPC3); Fc receptor-like 5 (FCRL5); immunoglobulin lambda-like polypeptide 1 (IGLLI), MPL; Biotin; c-MYC epitope Tag; CD34; LAMP1 TROP2; GFRalpha4; CDH17; CDH6; NYBR1; CDH19; CD200R; Slea (CA19.9; Sialyl Lewis Antigen) Fucosyl-GM1; PTK7; gpNMB; CDH1-CD324; DLL3; CD276/B7H3; IL11Ra; IL13Ra2; CD179b-IGLI1; ALK TCRgamma-delta; NKG2D; CD32 (FCGR2A); CSPG4-HMW-MAA; Tim1-/HVCR1; CSF2RA (GM-CSFR-alpha); TGFbetaR2; VEGFR2/KDR; Lews Ag; TCR-beta1 chain; TCR-beta2 chain; TCR-gamma chain; TCR-delta chain; FITC; Leutenizing hormone receptor (LHR); Follicle stimulating hormone receptor (FSHR); Chorionic Gonadotropin Hormone receptor (CGHR); CCR4; SLAMF6; SLAMF4; HIV1 envelope glycoprotein; HTLV1-Tax; CMV pp65; EBV-EBNA3c; influenza A hemagglutinin (HA); GAD; PDL1; Guanylyl cyclase C (GCC); KSHV-K8.1 protein; KSHV-gH protein; auto-antibody to desmoglein 3 (Dsg3); autoantibody to desmoglein 1 (Dsg1); HLA; HLA-A; HLA-A2; HLA-B; HLA-C; HLA-DP; HLA-DM; HLA-DOA; HLA-DOB; HLA-DQ; HLA-DR; HLA-G; IGE; CD99; RAS G12V; Tissue Factor 1 (TF1); AFP; GPRC5D; claudin18.2 (CLD18A2 OR CLDN18A.2)); P-glycoprotein; STEAP1; LIV1; NECTIN-4; CRIPTO; MPL; GPA33; BST1/CD157; low conductance chloride channel; Integrin B7; Muc17; C16ORF54; VISTA; Muc5Ac; FCRH5; CLDN6; MMP16, UPK1B; BMPR1 B; Ly6E, WISP1 and SLC34A2.

4-9. (canceled)

10. The method of claim 1, wherein the immune effector cell or population thereof is engineered to express a constitutive active mutant of JAK1, JAK3, STAT5b, STAT3, IL2RG, CARD11 and/or BRAF.

11. The method of claim 1, wherein the expression and/or function of BRD9, EZH2, MLL2, MLL3, MLL4, methylcytosine dioxygenase genes (e.g., Tet1, Tet2, Tet3), ATM, CHEK, FBXW10, BCOR, FAT1, ASXL1, PHF6, SF3B1, YY1, CBFb, Runx1, EHMT2 (G9A), SMARCA4, CREBBP, PRDM1/BLIMP1, HDAC2, TRAIL, and/or DR5, is reduced or eliminated and expression and function of JAK1, JAK3, STAT5b, STAT3, IL2RG, CARD11 and/or BRAF is enhanced in the immune effector cell or population thereof.

12. The method of claim 1, wherein the immune effector cell or population thereof expresses a CAR, a next generation CAR or a TCR.

13-15. (canceled)

16. The method of claim 1, wherein the CXCR4 antagonist is selected from the group consisting of Plerixafor or BL-80400.

17-28. (canceled)

29. A method of manufacturing an immune effector cell therapy product of claim 11, the method comprising introducing polynucleotide encoding a CAR/TCR into an immune effector cell such that said polynucleotide integrates into the genome of the immune effector cell within a BRD9, EZH2, MLL2, MLL3, MLL4, methylcytosine dioxygenase genes, ATM, CHEK, FBXW10, BCOR, FAT1, ASXL1, PHF6, SF3B1, YY1, CBFb, Runx1, EHMT2 (G9A), SMARCA4, CREBBP, PRDM1/BLIMP1, HDAC2, TRAIL, and/or DR5 gene or intron or exon thereof of wherein expression and/or function is reduced or eliminated.

30. A method of manufacturing an immune effector cell therapy product of claim 11, the method comprising contacting said immune effector cell ex vivo with a BRD9, EZH2, MLL2, MLL3, MLL4, methylcytosine dioxygenase genes, ATM, CHEK, FBXW10, BCOR, FAT1, ASXL1, PHF6, SF3B1, YY1, CBFb, Runx1, EHMT2 (G9A), SMARCA4, CREBBP, PRDM1/BLIMP1, HDAC2, TRAIL, and/or DR5 inhibitor.

31-51. (canceled)

52. A method of manufacturing an immune effector cell therapy product of claim 1 comprising exposing the cell to a bispecific or multispecific engager in the presence of an antigen presenting cell or an anti-presenting substrate.

53. The method of claim 52, where the bispecific or multi-specific engager comprises at least one antigen binding domain capable of engaging the immune effector cell and at least one antigen binding domain capable of engaging an antigen presenting cell (APC) or antigen presenting substrate (APS).

54. The method of claim 53, where the APC is a hematopoietic cell, a B cell lineage cell or wherein the cell comprises a CD19 antigen.

55-56. (canceled)

57. The method of claim 53, where the APC is selected from the group consisting of a REC-1, JEKO-1, MINO, GRANTA-519, NALM6 and RAJI cell.

58-59. (canceled)

60. A method of claim 52, where the method further involves exposing the immune effector cells to an agonist that activates a costimulatory receptor on immune cells

61. The method of claim 52, wherein the bispecific or multispecific engager comprises at least one binding domain capable of binding to and activating the T cell receptor (TCR) complex of T cells.

62. (canceled)

63. The method of claim 52, wherein the bispecific or multispecific engager comprises at least one binding domain capable of binding to and activating a receptor on the T cells that provides co-stimulation.

64. The method of claim 63, where the receptor bound by the bispecific or multispecific engager is selected from the group consisting of CD28, CD137 (4-1BB), CD134 (OX40), Dap10, CD27, CD2, CD5, ICAM-1, LFA-1, TNFR-I, TNFR-II, Fas, CD30 and CD40.

65-83. (canceled)

84. A method of expanding and/or activating an immune effector cell comprising administering to a subject a bispecific or multispecific T cell engager.

85. A method of claim 84, where the bispecific or multi-specific engager contains at least one antigen binding domain capable of engaging the immune cells and at least one antigen binding domain capable of engaging an antigen presenting cell (APC).

86. The method of claim 85, wherein the APC is a hematopoietic cell, a B cell lineage cell or a cell expressing the CD19 antigen.

87-153. (canceled)

The application's sequence listing, which the Patent Office published only in electronic form, follows.

SEQUENCE LISTING (3059 sequences)

SEQ ID NO: 1 - DNA, 20 bp, Artificial Sequence
  Synthetic Polynucleotide
cttgacggacagtaccgcag

SEQ ID NO: 2 - DNA, 20 bp, Artificial Sequence
  Synthetic Polynucleotide
agagagggagcactgtgaca

SEQ ID NO: 3 - DNA, 20 bp, Artificial Sequence
  Synthetic Polynucleotide
actccagttactatgatgac

SEQ ID NO: 4 - DNA, 20 bp, Artificial Sequence
  Synthetic Polynucleotide
agataccgtgtactacaagt

SEQ ID NO: 5 - DNA, 20 bp, Artificial Sequence
  Synthetic Polynucleotide
atgttgggggtacattcagg

SEQ ID NO: 6 - DNA, 20 bp, Artificial Sequence
  Synthetic Polynucleotide
ttatcagaaggaaatttccg

SEQ ID NO: 7 - DNA, 20 bp, Artificial Sequence
  Synthetic Polynucleotide
ttatgatgggaaagtacacg

SEQ ID NO: 8 - DNA, 20 bp, Artificial Sequence
  Synthetic Polynucleotide
cttctgtgagctcattgcgc

SEQ ID NO: 9 - DNA, 20 bp, Artificial Sequence
  Synthetic Polynucleotide
ggtggaaattcccgccaacg

SEQ ID NO: 10 - DNA, 20 bp, Artificial Sequence
  Synthetic Polynucleotide
ttcggggtagacctccatag

SEQ ID NO: 11 - DNA, 20 bp, Artificial Sequence
  Synthetic Polynucleotide
ccttcgaagcgaaagtactg

SEQ ID NO: 12 - DNA, 20 bp, Artificial Sequence
  Synthetic Polynucleotide
cccctatcctagtcctacgg

SEQ ID NO: 13 - DNA, 20 bp, Artificial Sequence
  Synthetic Polynucleotide
attcagacattaggccatcg

SEQ ID NO: 14 - DNA, 20 bp, Artificial Sequence
  Synthetic Polynucleotide
ctgttgccaatacacaatca

SEQ ID NO: 15 - DNA, 20 bp, Artificial Sequence
  Synthetic Polynucleotide
gcacacggtctagttctcag

SEQ ID NO: 16 - DNA, 20 bp, Artificial Sequence
  Synthetic Polynucleotide
cccatgcgacgacctcccca

SEQ ID NO: 17 - DNA, 20 bp, Artificial Sequence
  Synthetic Polynucleotide
aagatgcgcatggctcgatg

SEQ ID NO: 18 - DNA, 20 bp, Artificial Sequence
  Synthetic Polynucleotide
cgattcgtagatcttcaggt

SEQ ID NO: 19 - DNA, 20 bp, Artificial Sequence
  Synthetic Polynucleotide
ggggcccagctatccaaccc

SEQ ID NO: 20 - DNA, 20 bp, Artificial Sequence
  Synthetic Polynucleotide
ggagccacatctgctaggcg

SEQ ID NO: 21 - DNA, 20 bp, Artificial Sequence
  Synthetic Polynucleotide
tgggacacagactctacagg

SEQ ID NO: 22 - DNA, 20 bp, Artificial Sequence
  Synthetic Polynucleotide
gatattgctgtgtcttacac

SEQ ID NO: 23 - DNA, 20 bp, Artificial Sequence
  Synthetic Polynucleotide
caggagtcaggacttagatg

SEQ ID NO: 24 - DNA, 20 bp, Artificial Sequence
  Synthetic Polynucleotide
aggaggtgattatccacttg

SEQ ID NO: 25 - DNA, 20 bp, Artificial Sequence
  Synthetic Polynucleotide
gggcccataatcgagcccag

SEQ ID NO: 26 - DNA, 20 bp, Artificial Sequence
  Synthetic Polynucleotide
aggtaaagctggctttcgag

SEQ ID NO: 27 - DNA, 20 bp, Artificial Sequence
  Synthetic Polynucleotide
gcatacatagaagatcacag

SEQ ID NO: 28 - DNA, 20 bp, Artificial Sequence
  Synthetic Polynucleotide
agagctgtttgacaaagtgg

SEQ ID NO: 29 - DNA, 20 bp, Artificial Sequence
  Synthetic Polynucleotide
ccaccccatcaagagatcgg

SEQ ID NO: 30 - DNA, 20 bp, Artificial Sequence
  Synthetic Polynucleotide
tcctgccagctaacactcag

SEQ ID NO: 31 - DNA, 20 bp, Artificial Sequence
  Synthetic Polynucleotide
gttagtgctgactccggtaa

SEQ ID NO: 32 - DNA, 20 bp, Artificial Sequence
  Synthetic Polynucleotide
acaaagttcatgcaacacgg

SEQ ID NO: 33 - DNA, 20 bp, Artificial Sequence
  Synthetic Polynucleotide
tggagaaagacgtaacttcg

SEQ ID NO: 34 - DNA, 20 bp, Artificial Sequence
  Synthetic Polynucleotide
tctgccctgaggtatgcgat

SEQ ID NO: 35 - DNA, 20 bp, Artificial Sequence
  Synthetic Polynucleotide
gattccgcttggtgaaaacg

SEQ ID NO: 36 - DNA, 20 bp, Artificial Sequence
  Synthetic Polynucleotide
gttccaaaaaccctcacacc

SEQ ID NO: 37 - DNA, 20 bp, Artificial Sequence
  Synthetic Polynucleotide
gtgactccaagaagccactg

SEQ ID NO: 38 - DNA, 20 bp, Artificial Sequence
  Synthetic Polynucleotide
cctctacaatgggtgcaccg

SEQ ID NO: 39 - DNA, 20 bp, Artificial Sequence
  Synthetic Polynucleotide
ctcagggccagtgtaccatg

SEQ ID NO: 40 - DNA, 20 bp, Artificial Sequence
  Synthetic Polynucleotide
aatgccctgactacctcgag

SEQ ID NO: 41 - DNA, 20 bp, Artificial Sequence
  Synthetic Polynucleotide
gacctacctgaataacacac

SEQ ID NO: 42 - DNA, 20 bp, Artificial Sequence
  Synthetic Polynucleotide
ccaaggctattcagtgtgcg

SEQ ID NO: 43 - DNA, 20 bp, Artificial Sequence
  Synthetic Polynucleotide
tcatcaccaagttcgcatgt

SEQ ID NO: 44 - DNA, 20 bp, Artificial Sequence
  Synthetic Polynucleotide
tctaccccaacagcgacatg

SEQ ID NO: 45 - DNA, 20 bp, Artificial Sequence
  Synthetic Polynucleotide
acttgatcgagaaaccccgg

SEQ ID NO: 46 - DNA, 20 bp, Artificial Sequence
  Synthetic Polynucleotide
ctaaccgttagagcttccga

SEQ ID NO: 47 - DNA, 20 bp, Artificial Sequence
  Synthetic Polynucleotide
ctacgacagtcacttcgatg

SEQ ID NO: 48 - DNA, 20 bp, Artificial Sequence
  Synthetic Polynucleotide
aattcccagagatctaggcg

SEQ ID NO: 49 - DNA, 20 bp, Artificial Sequence
  Synthetic Polynucleotide
gaagtggaagctgagaacga

SEQ ID NO: 50 - DNA, 20 bp, Artificial Sequence
  Synthetic Polynucleotide
agaaaatgaacacttgcttg

SEQ ID NO: 51 - DNA, 20 bp, Artificial Sequence
  Synthetic Polynucleotide
ccttcatacagttcccgttg

SEQ ID NO: 52 - DNA, 20 bp, Artificial Sequence
  Synthetic Polynucleotide
ggccatcagtacttcctgag

SEQ ID NO: 53 - DNA, 20 bp, Artificial Sequence
  Synthetic Polynucleotide
cccacgtgctgaataacgga

SEQ ID NO: 54 - DNA, 20 bp, Artificial Sequence
  Synthetic Polynucleotide
gctgccacaagcactctagg

SEQ ID NO: 55 - DNA, 20 bp, Artificial Sequence
  Synthetic Polynucleotide
aaagagaatcgccaactcag

SEQ ID NO: 56 - DNA, 20 bp, Artificial Sequence
  Synthetic Polynucleotide
acaaactctggacggccggt

SEQ ID NO: 57 - DNA, 20 bp, Artificial Sequence
  Synthetic Polynucleotide
gaatcagtgcgtatacagcg

SEQ ID NO: 58 - DNA, 20 bp, Artificial Sequence
  Synthetic Polynucleotide
tttcacgtatcaaaccaccc

SEQ ID NO: 59 - DNA, 20 bp, Artificial Sequence
  Synthetic Polynucleotide
atctgacgtacactttccag

SEQ ID NO: 60 - DNA, 20 bp, Artificial Sequence
  Synthetic Polynucleotide
ggtcaaatgaagcgcaacag

SEQ ID NO: 61 - DNA, 20 bp, Artificial Sequence
  Synthetic Polynucleotide
ctttatcatgcaatgcacag

SEQ ID NO: 62 - DNA, 20 bp, Artificial Sequence
  Synthetic Polynucleotide
aaaactgcacataactccga

SEQ ID NO: 63 - DNA, 20 bp, Artificial Sequence
  Synthetic Polynucleotide
ggcagcgcaccataagtgca

SEQ ID NO: 64 - DNA, 20 bp, Artificial Sequence
  Synthetic Polynucleotide
ttgtaagtcaaatagagaca

SEQ ID NO: 65 - DNA, 20 bp, Artificial Sequence
  Synthetic Polynucleotide
ccaactatctaactccactc

SEQ ID NO: 66 - DNA, 20 bp, Artificial Sequence
  Synthetic Polynucleotide
ctggtaagtctcaccttccg

SEQ ID NO: 67 - DNA, 20 bp, Artificial Sequence
  Synthetic Polynucleotide
tctttgtatgaacagctggg

SEQ ID NO: 68 - DNA, 20 bp, Artificial Sequence
  Synthetic Polynucleotide
caattgtcagaagtattctg

SEQ ID NO: 69 - DNA, 20 bp, Artificial Sequence
  Synthetic Polynucleotide
taatcttcatcaatcaatag

SEQ ID NO: 70 - DNA, 20 bp, Artificial Sequence
  Synthetic Polynucleotide
ttagttagttgatactactg

SEQ ID NO: 71 - DNA, 20 bp, Artificial Sequence
  Synthetic Polynucleotide
cagtaaaagaaaatcacggt

SEQ ID NO: 72 - DNA, 20 bp, Artificial Sequence
  Synthetic Polynucleotide
aaaaggatcaagacgctctg

SEQ ID NO: 73 - DNA, 20 bp, Artificial Sequence
  Synthetic Polynucleotide
tgaacaaacgctggtcaccg

SEQ ID NO: 74 - DNA, 20 bp, Artificial Sequence
  Synthetic Polynucleotide
agatattgaccatgagacag

SEQ ID NO: 75 - DNA, 20 bp, Artificial Sequence
  Synthetic Polynucleotide
ggtcaccgacgacccgaccc

SEQ ID NO: 76 - DNA, 20 bp, Artificial Sequence
  Synthetic Polynucleotide
ggagaccatcgagaccacag

SEQ ID NO: 77 - DNA, 20 bp, Artificial Sequence
  Synthetic Polynucleotide
gccgacttacgatttccgag

SEQ ID NO: 78 - DNA, 20 bp, Artificial Sequence
  Synthetic Polynucleotide
cctgcctcacctcacactcg

SEQ ID NO: 79 - DNA, 20 bp, Artificial Sequence
  Synthetic Polynucleotide
aagtcgacatactctcggct

SEQ ID NO: 80 - DNA, 20 bp, Artificial Sequence
  Synthetic Polynucleotide
ggagtctgtgttatctggaa

SEQ ID NO: 81 - DNA, 20 bp, Artificial Sequence
  Synthetic Polynucleotide
ctgatcgtaggaccacggtg

SEQ ID NO: 82 - DNA, 20 bp, Artificial Sequence
  Synthetic Polynucleotide
cacttcgaccgacaaacctg

SEQ ID NO: 83 - DNA, 20 bp, Artificial Sequence
  Synthetic Polynucleotide
tagatgatcagaccaagccc

SEQ ID NO: 84 - DNA, 20 bp, Artificial Sequence
  Synthetic Polynucleotide
ggcagtggagtggttcaggg

SEQ ID NO: 85 - DNA, 20 bp, Artificial Sequence
  Synthetic Polynucleotide
ggggagcgagtgatgtacgt

SEQ ID NO: 86 - DNA, 20 bp, Artificial Sequence
  Synthetic Polynucleotide
ggacgcgttcaagtaagcgt

SEQ ID NO: 87 - DNA, 20 bp, Artificial Sequence
  Synthetic Polynucleotide
tttggacagatctattccag

SEQ ID NO: 88 - DNA, 20 bp, Artificial Sequence
  Synthetic Polynucleotide
aggatgcggatatgactctg

SEQ ID NO: 89 - DNA, 20 bp, Artificial Sequence
  Synthetic Polynucleotide
gatgtatcaacctagtgctg

SEQ ID NO: 90 - DNA, 20 bp, Artificial Sequence
  Synthetic Polynucleotide
tacaacagatcgtgtaatga

SEQ ID NO: 91 - DNA, 20 bp, Artificial Sequence
  Synthetic Polynucleotide
cctcctccaagcatcagtaa

SEQ ID NO: 92 - DNA, 20 bp, Artificial Sequence
  Synthetic Polynucleotide
tcaaagagtccatcaaacac

SEQ ID NO: 93 - DNA, 20 bp, Artificial Sequence
  Synthetic Polynucleotide
caagaggtgaccatcccccg

SEQ ID NO: 94 - DNA, 20 bp, Artificial Sequence
  Synthetic Polynucleotide
ctccaggtggttgttcacca

SEQ ID NO: 95 - DNA, 20 bp, Artificial Sequence
  Synthetic Polynucleotide
cggacaggtacaactgccga

SEQ ID NO: 96 - DNA, 20 bp, Artificial Sequence
  Synthetic Polynucleotide
ctctccgtccacactctcag

SEQ ID NO: 97 - DNA, 20 bp, Artificial Sequence
  Synthetic Polynucleotide
gggcgtacgagtttgacaag

SEQ ID NO: 98 - DNA, 20 bp, Artificial Sequence
  Synthetic Polynucleotide
gcagcagacagacgagtacg

SEQ ID NO: 99 - DNA, 20 bp, Artificial Sequence
  Synthetic Polynucleotide
ctaggtatgaagtagctccg

SEQ ID NO: 100 - DNA, 20 bp, Artificial Sequence
  Synthetic Polynucleotide
tgaacaccatcatgcagctg

SEQ ID NO: 101 - DNA, 20 bp, Artificial Sequence
  Synthetic Polynucleotide
cttagcccactgatgaacga

SEQ ID NO: 102 - DNA, 20 bp, Artificial Sequence
  Synthetic Polynucleotide
ccgcaaatgactggtcacgc

SEQ ID NO: 103 - DNA, 20 bp, Artificial Sequence
  Synthetic Polynucleotide
attgcccccctccaaacacg

SEQ ID NO: 104 - DNA, 20 bp, Artificial Sequence
  Synthetic Polynucleotide
caggacggtacttacgtctg

SEQ ID NO: 105 - DNA, 11 bp, Artificial Sequence
  Synthetic Polynucleotide
  misc_feature (1)..(11): n is a, c, g, or t
nnnnnnnnnnn

SEQ ID NO: 106 - DNA, 30 bp, Artificial Sequence
  Synthetic Polynucleotide
gcagcttgacggacagtaccgcagaggagc

SEQ ID NO: 107 - DNA, 30 bp, Artificial Sequence
  Synthetic Polynucleotide
agcgagagagggagcactgtgacacggagg

SEQ ID NO: 108 - DNA, 30 bp, Artificial Sequence
  Synthetic Polynucleotide
cacgactccagttactatgatgacaggtca

SEQ ID NO: 109 - DNA, 30 bp, Artificial Sequence
  Synthetic Polynucleotide
ggccagataccgtgtactacaagttggcga

SEQ ID NO: 110 - DNA, 30 bp, Artificial Sequence
  Synthetic Polynucleotide
atctatgttgggggtacattcaggaggaag

SEQ ID NO: 111 - DNA, 30 bp, Artificial Sequence
  Synthetic Polynucleotide
aattttatcagaaggaaatttccgaggtgg

SEQ ID NO: 112 - DNA, 30 bp, Artificial Sequence
  Synthetic Polynucleotide
aaaattatgatgggaaagtacacggggata

SEQ ID NO: 113 - DNA, 30 bp, Artificial Sequence
  Synthetic Polynucleotide
ctgacttctgtgagctcattgcgcgggact

SEQ ID NO: 114 - DNA, 30 bp, Artificial Sequence
  Synthetic Polynucleotide
gacgggtggaaattcccgccaacggggaac

SEQ ID NO: 115 - DNA, 30 bp, Artificial Sequence
  Synthetic Polynucleotide
tgcattcggggtagacctccataggggtca

SEQ ID NO: 116 - DNA, 30 bp, Artificial Sequence
  Synthetic Polynucleotide
cacaccttcgaagcgaaagtactggggctc

SEQ ID NO: 117 - DNA, 30 bp, Artificial Sequence
  Synthetic Polynucleotide
atcccccctatcctagtcctacgggggccc

SEQ ID NO: 118 - DNA, 30 bp, Artificial Sequence
  Synthetic Polynucleotide
gataattcagacattaggccatcggggtct

SEQ ID NO: 119 - DNA, 30 bp, Artificial Sequence
  Synthetic Polynucleotide
acagctgttgccaatacacaatcagggtat

SEQ ID NO: 120 - DNA, 30 bp, Artificial Sequence
  Synthetic Polynucleotide
tgtggcacacggtctagttctcagtggcac

SEQ ID NO: 121 - DNA, 30 bp, Artificial Sequence
  Synthetic Polynucleotide
agaccccatgcgacgacctccccagggtct

SEQ ID NO: 122 - DNA, 30 bp, Artificial Sequence
  Synthetic Polynucleotide
caagaagatgcgcatggctcgatgtggaca

SEQ ID NO: 123 - DNA, 30 bp, Artificial Sequence
  Synthetic Polynucleotide
gcaccgattcgtagatcttcaggtgggctt

SEQ ID NO: 124 - DNA, 30 bp, Artificial Sequence
  Synthetic Polynucleotide
gtctggggcccagctatccaacccgggcca

SEQ ID NO: 125 - DNA, 30 bp, Artificial Sequence
  Synthetic Polynucleotide
ggtaggagccacatctgctaggcgaggagg

SEQ ID NO: 126 - DNA, 30 bp, Artificial Sequence
  Synthetic Polynucleotide
agcttgggacacagactctacagggggtgg

SEQ ID NO: 127 - DNA, 30 bp, Artificial Sequence
  Synthetic Polynucleotide
gatggatattgctgtgtcttacacaggtga

SEQ ID NO: 128 - DNA, 30 bp, Artificial Sequence
  Synthetic Polynucleotide
aactcaggagtcaggacttagatgaggaac

SEQ ID NO: 129 - DNA, 30 bp, Artificial Sequence
  Synthetic Polynucleotide
ccccaggaggtgattatccacttggggact

SEQ ID NO: 130 - DNA, 30 bp, Artificial Sequence
  Synthetic Polynucleotide
tgaagggcccataatcgagcccagggggca

SEQ ID NO: 131 - DNA, 30 bp, Artificial Sequence
  Synthetic Polynucleotide
ggagaggtaaagctggctttcgagaggaaa

SEQ ID NO: 132 - DNA, 30 bp, Artificial Sequence
  Synthetic Polynucleotide
cattgcatacatagaagatcacagtggcaa

SEQ ID NO: 133 - DNA, 30 bp, Artificial Sequence
  Synthetic Polynucleotide
ggggagagctgtttgacaaagtggtgggga

SEQ ID NO: 134 - DNA, 30 bp, Artificial Sequence
  Synthetic Polynucleotide
aaatccaccccatcaagagatcggcggaaa

SEQ ID NO: 135 - DNA, 30 bp, Artificial Sequence
  Synthetic Polynucleotide
agcttcctgccagctaacactcaggggttc

SEQ ID NO: 136 - DNA, 30 bp, Artificial Sequence
  Synthetic Polynucleotide
gagagttagtgctgactccggtaagggtgt

SEQ ID NO: 137 - DNA, 30 bp, Artificial Sequence
  Synthetic Polynucleotide
aaaaacaaagttcatgcaacacggtggttt

SEQ ID NO: 138 - DNA, 30 bp, Artificial Sequence
  Synthetic Polynucleotide
ctaatggagaaagacgtaacttcggggtaa

SEQ ID NO: 139 - DNA, 30 bp, Artificial Sequence
  Synthetic Polynucleotide
ttgatctgccctgaggtatgcgatgggtga

SEQ ID NO: 140 - DNA, 30 bp, Artificial Sequence
  Synthetic Polynucleotide
atgggattccgcttggtgaaaacgaggggc

SEQ ID NO: 141 - DNA, 30 bp, Artificial Sequence
  Synthetic Polynucleotide
tccagttccaaaaaccctcacaccaggtgc

SEQ ID NO: 142 - DNA, 30 bp, Artificial Sequence
  Synthetic Polynucleotide
agaggtgactccaagaagccactgagggtg

SEQ ID NO: 143 - DNA, 30 bp, Artificial Sequence
  Synthetic Polynucleotide
ataacctctacaatgggtgcaccgtggtaa

SEQ ID NO: 144 - DNA, 30 bp, Artificial Sequence
  Synthetic Polynucleotide
tggactcagggccagtgtaccatggggact

SEQ ID NO: 145 - DNA, 30 bp, Artificial Sequence
  Synthetic Polynucleotide
ccagaatgccctgactacctcgagtggctg

SEQ ID NO: 146 - DNA, 30 bp, Artificial Sequence
  Synthetic Polynucleotide
tgctgacctacctgaataacacactggtag

SEQ ID NO: 147 - DNA, 30 bp, Artificial Sequence
  Synthetic Polynucleotide
ttttccaaggctattcagtgtgcgaggtaa

SEQ ID NO: 148 - DNA, 30 bp, Artificial Sequence
  Synthetic Polynucleotide
acaatcatcaccaagttcgcatgttggctg

SEQ ID NO: 149 - DNA, 30 bp, Artificial Sequence
  Synthetic Polynucleotide
agcttctaccccaacagcgacatggggaac

SEQ ID NO: 150 - DNA, 30 bp, Artificial Sequence
  Synthetic Polynucleotide
aaaaacttgatcgagaaaccccggcggaga

SEQ ID NO: 151 - DNA, 30 bp, Artificial Sequence
  Synthetic Polynucleotide
cgagctaaccgttagagcttccgatggcag

SEQ ID NO: 152 - DNA, 30 bp, Artificial Sequence
  Synthetic Polynucleotide
gcaactacgacagtcacttcgatgtggaca

SEQ ID NO: 153 - DNA, 30 bp, Artificial Sequence
  Synthetic Polynucleotide
ggacaattcccagagatctaggcgtgggag

SEQ ID NO: 154 - DNA, 30 bp, Artificial Sequence
  Synthetic Polynucleotide
atccgaagtggaagctgagaacgaaggtgg

SEQ ID NO: 155 - DNA, 30 bp, Artificial Sequence
  Synthetic Polynucleotide
ccccagaaaatgaacacttgcttggggcag

SEQ ID NO: 156 - DNA, 30 bp, Artificial Sequence
  Synthetic Polynucleotide
aacaccttcatacagttcccgttgaggaaa

SEQ ID NO: 157 - DNA, 30 bp, Artificial Sequence
  Synthetic Polynucleotide
accaggccatcagtacttcctgagaggaga

SEQ ID NO: 158 - DNA, 30 bp, Artificial Sequence
  Synthetic Polynucleotide
ctggcccacgtgctgaataacggatggtgt

SEQ ID NO: 159 - DNA, 30 bp, Artificial Sequence
  Synthetic Polynucleotide
ggaggctgccacaagcactctaggtggcct

SEQ ID NO: 160 - DNA, 30 bp, Artificial Sequence
  Synthetic Polynucleotide
tggcaaagagaatcgccaactcagcgggtt

SEQ ID NO: 161 - DNA, 30 bp, Artificial Sequence
  Synthetic Polynucleotide
ggtcacaaactctggacggccggtgggaag

SEQ ID NO: 162 - DNA, 30 bp, Artificial Sequence
  Synthetic Polynucleotide
aggagaatcagtgcgtatacagcgtggtcc

SEQ ID NO: 163 - DNA, 30 bp, Artificial Sequence
  Synthetic Polynucleotide
caactttcacgtatcaaaccaccctgggtg

SEQ ID NO: 164 - DNA, 30 bp, Artificial Sequence
  Synthetic Polynucleotide
gtagatctgacgtacactttccaggggtgc

SEQ ID NO: 165 - DNA, 30 bp, Artificial Sequence
  Synthetic Polynucleotide
cataggtcaaatgaagcgcaacagagggga

SEQ ID NO: 166 - DNA, 30 bp, Artificial Sequence
  Synthetic Polynucleotide
tgagctttatcatgcaatgcacagtggtag

SEQ ID NO: 167 - DNA, 30 bp, Artificial Sequence
  Synthetic Polynucleotide
caagaaaactgcacataactccgaaggtac

SEQ ID NO: 168 - DNA, 30 bp, Artificial Sequence
  Synthetic Polynucleotide
aggtggcagcgcaccataagtgcatggtaa

SEQ ID NO: 169 - DNA, 30 bp, Artificial Sequence
  Synthetic Polynucleotide
gcttttgtaagtcaaatagagacaaggaat

SEQ ID NO: 170 - DNA, 30 bp, Artificial Sequence
  Synthetic Polynucleotide
aaaaccaactatctaactccactcaggtaa

SEQ ID NO: 171 - DNA, 30 bp, Artificial Sequence
  Synthetic Polynucleotide
atgtctggtaagtctcaccttccgaggaaa

SEQ ID NO: 172 - DNA, 30 bp, Artificial Sequence
  Synthetic Polynucleotide
tcagtctttgtatgaacagctgggtggatg

SEQ ID NO: 173 - DNA, 30 bp, Artificial Sequence
  Synthetic Polynucleotide
actccaattgtcagaagtattctgaggaaa

SEQ ID NO: 174 - DNA, 30 bp, Artificial Sequence
  Synthetic Polynucleotide
atagtaatcttcatcaatcaatagcggttc

SEQ ID NO: 175 - DNA, 30 bp, Artificial Sequence
  Synthetic Polynucleotide
ctttttagttagttgatactactgtggagt

SEQ ID NO: 176 - DNA, 30 bp, Artificial Sequence
  Synthetic Polynucleotide
gagccagtaaaagaaaatcacggtgggatg

SEQ ID NO: 177 - DNA, 30 bp, Artificial Sequence
  Synthetic Polynucleotide
ctgcaaaaggatcaagacgctctggggaaa

SEQ ID NO: 178 - DNA, 30 bp, Artificial Sequence
  Synthetic Polynucleotide
acattgaacaaacgctggtcaccgtggcgg

SEQ ID NO: 179 - DNA, 30 bp, Artificial Sequence
  Synthetic Polynucleotide
aaaaagatattgaccatgagacagtggttg

SEQ ID NO: 180 - DNA, 30 bp, Artificial Sequence
  Synthetic Polynucleotide
cgctggtcaccgacgacccgacccaggtgc

SEQ ID NO: 181 - DNA, 30 bp, Artificial Sequence
  Synthetic Polynucleotide
cggtggagaccatcgagaccacagtggtgg

SEQ ID NO: 182 - DNA, 30 bp, Artificial Sequence
  Synthetic Polynucleotide
gccagccgacttacgatttccgagcggccg

SEQ ID NO: 183 - DNA, 30 bp, Artificial Sequence
  Synthetic Polynucleotide
cccgcctgcctcacctcacactcgcggctc

SEQ ID NO: 184 - DNA, 30 bp, Artificial Sequence
  Synthetic Polynucleotide
ttctaagtcgacatactctcggctaggtgt

SEQ ID NO: 185 - DNA, 30 bp, Artificial Sequence
  Synthetic Polynucleotide
gaatggagtctgtgttatctggaaaggctg

SEQ ID NO: 186 - DNA, 30 bp, Artificial Sequence
  Synthetic Polynucleotide
aggactgatcgtaggaccacggtggggatg

SEQ ID NO: 187 - DNA, 30 bp, Artificial Sequence
  Synthetic Polynucleotide
cttccacttcgaccgacaaacctgaggtca

SEQ ID NO: 188 - DNA, 30 bp, Artificial Sequence
  Synthetic Polynucleotide
aaactagatgatcagaccaagcccgggagc

SEQ ID NO: 189 - DNA, 30 bp, Artificial Sequence
  Synthetic Polynucleotide
taaaggcagtggagtggttcagggaggcac

SEQ ID NO: 190 - DNA, 30 bp, Artificial Sequence
  Synthetic Polynucleotide
aatgggggagcgagtgatgtacgtgggtct

SEQ ID NO: 191 - DNA, 30 bp, Artificial Sequence
  Synthetic Polynucleotide
cgtaggacgcgttcaagtaagcgtaggagt

SEQ ID NO: 192 - DNA, 30 bp, Artificial Sequence
  Synthetic Polynucleotide
ctcttttggacagatctattccagagggga

SEQ ID NO: 193 - DNA, 30 bp, Artificial Sequence
  Synthetic Polynucleotide
atggaggatgcggatatgactctgtggaca

SEQ ID NO: 194 - DNA, 30 bp, Artificial Sequence
  Synthetic Polynucleotide
tggagatgtatcaacctagtgctgtggtat

SEQ ID NO: 195 - DNA, 30 bp, Artificial Sequence
  Synthetic Polynucleotide
tttatacaacagatcgtgtaatgacggtat

SEQ ID NO: 196 - DNA, 30 bp, Artificial Sequence
  Synthetic Polynucleotide
gccacctcctccaagcatcagtaatggtaa

SEQ ID NO: 197 - DNA, 30 bp, Artificial Sequence
  Synthetic Polynucleotide
aaactcaaagagtccatcaaacactggaca

SEQ ID NO: 198 - DNA, 30 bp, Artificial Sequence
  Synthetic Polynucleotide
agctcaagaggtgaccatcccccggggtga

SEQ ID NO: 199 - DNA, 30 bp, Artificial Sequence
  Synthetic Polynucleotide
ctacctccaggtggttgttcaccacggcct

SEQ ID NO: 200 - DNA, 30 bp, Artificial Sequence
  Synthetic Polynucleotide
ttcacggacaggtacaactgccgagggtgg

SEQ ID NO: 201 - DNA, 30 bp, Artificial Sequence
  Synthetic Polynucleotide
ccacctctccgtccacactctcagtggcca

SEQ ID NO: 202 - DNA, 30 bp, Artificial Sequence
  Synthetic Polynucleotide
aactgggcgtacgagtttgacaagtgggcc

SEQ ID NO: 203 - DNA, 30 bp, Artificial Sequence
  Synthetic Polynucleotide
tcttgcagcagacagacgagtacgtggcta

SEQ ID NO: 204 - DNA, 30 bp, Artificial Sequence
  Synthetic Polynucleotide
ttttctaggtatgaagtagctccgaggtct

SEQ ID NO: 205 - DNA, 30 bp, Artificial Sequence
  Synthetic Polynucleotide
ctgatgaacaccatcatgcagctgcggaag

SEQ ID NO: 206 - DNA, 30 bp, Artificial Sequence
  Synthetic Polynucleotide
cctccttagcccactgatgaacgatggctc

SEQ ID NO: 207 - DNA, 30 bp, Artificial Sequence
  Synthetic Polynucleotide
ttccccgcaaatgactggtcacgcgggact

SEQ ID NO: 208 - DNA, 30 bp, Artificial Sequence
  Synthetic Polynucleotide
tctgattgcccccctccaaacacgaggtag

SEQ ID NO: 209 - DNA, 30 bp, Artificial Sequence
  Synthetic Polynucleotide
atgacaggacggtacttacgtctggggctg

SEQ ID NO: 210 - DNA, 22 bp, Artificial Sequence
  Synthetic Polynucleotide
  misc_feature (1)..(22): n is a, c, g, or t
nnnnnnnnnnnnnnnnnnnnnn

SEQ ID NO: 211 - DNA, 21 bp, Artificial Sequence
  Synthetic Polynucleotide
gctaggttaattgggaccaaa

SEQ ID NO: 212 - DNA, 21 bp, Artificial Sequence
  Synthetic Polynucleotide
cccaacatagatggaccaaat

SEQ ID NO: 213 - DNA, 21 bp, Artificial Sequence
  Synthetic Polynucleotide
gccgtcaactagaacatgata

SEQ ID NO: 214 - DNA, 21 bp, Artificial Sequence
  Synthetic Polynucleotide
tggtcaaatacttcatcaaat

SEQ ID NO: 215 - DNA, 21 bp, Artificial Sequence
  Synthetic Polynucleotide
gccaagtcattatttgaccat

SEQ ID NO: 216 - DNA, 21 bp, Artificial Sequence
  Synthetic Polynucleotide
cagatgcacaggccaattaag

SEQ ID NO: 217 - DNA, 21 bp, Artificial Sequence
  Synthetic Polynucleotide
caagaggaattgatcctaatt

SEQ ID NO: 218 - DNA, 21 bp, Artificial Sequence
  Synthetic Polynucleotide
caatgttctcatgttccagtt

SEQ ID NO: 219 - DNA, 21 bp, Artificial Sequence
  Synthetic Polynucleotide
cctctctcatgagaaccttat

SEQ ID NO: 220 - DNA, 21 bp, Artificial Sequence
  Synthetic Polynucleotide
cctttgtaaatacagagcttg

SEQ ID NO: 221 - DNA, 21 bp, Artificial Sequence
  Synthetic Polynucleotide
ccacgaaacttatactttcaa

SEQ ID NO: 222 - DNA, 21 bp, Artificial Sequence
  Synthetic Polynucleotide
gctctatatttctgtctccaa

SEQ ID NO: 223 - DNA, 21 bp, Artificial Sequence
  Synthetic Polynucleotide
catactgggccaagcatatat

SEQ ID NO: 224 - DNA, 21 bp, Artificial Sequence
  Synthetic Polynucleotide
atgacccattagctgatattt

SEQ ID NO: 225 - DNA, 29 bp, Artificial Sequence
  Synthetic Polynucleotide
tctccacagctaagaagatcagtatctgt

SEQ ID NO: 226 - DNA, 21 bp, Artificial Sequence
  Synthetic Polynucleotide
cctcaacttcaaccctcactt

SEQ ID NO: 227 - DNA, 21 bp, Artificial Sequence
  Synthetic Polynucleotide
cgtttccagatgacaggaatt

SEQ ID NO: 228 - DNA, 21 bp, Artificial Sequence
  Synthetic Polynucleotide
cacgtgcaaagtgagctaaag

SEQ ID NO: 229 - DNA, 21 bp, Artificial Sequence
  Synthetic Polynucleotide
ttacgaacagaaggactattt

SEQ ID NO: 230 - DNA, 21 bp, Artificial Sequence
  Synthetic Polynucleotide
gagagcacacctattcagcaa

SEQ ID NO: 231 - DNA, 19 bp, Artificial Sequence
  Synthetic Polynucleotide
cgagtagagaagttatcag

SEQ ID NO: 232 - DNA, 21 bp, Artificial Sequence
  Synthetic Polynucleotide
gcaatgacatacaataggcca

SEQ ID NO: 233 - DNA, 21 bp, Artificial Sequence
  Synthetic Polynucleotide
gtacgtgggagagatcattac

SEQ ID NO: 234 - DNA, 21 bp, Artificial Sequence
  Synthetic Polynucleotide
agtcgagtacctgtgcgatta

SEQ ID NO: 235 - DNA, 21 bp, Artificial Sequence
  Synthetic Polynucleotide
accctcatgttcagggtggat

SEQ ID NO: 236 - DNA, 21 bp, Artificial Sequence
  Synthetic Polynucleotide
cctgaagaatatccggcagtt

SEQ ID NO: 237 - DNA, 21 bp, Artificial Sequence
  Synthetic Polynucleotide
ccagcactataagttccgtta

SEQ ID NO: 238 - DNA, 21 bp, Artificial Sequence
  Synthetic Polynucleotide
cccacctgaatcatcaccttt

SEQ ID NO: 239 - DNA, 21 bp, Artificial Sequence
  Synthetic Polynucleotide
cctcgcctcaagaaatggaaa

SEQ ID NO: 240 - DNA, 21 bp, Artificial Sequence
  Synthetic Polynucleotide
ccagggtttcattctgtcttt

SEQ ID NO: 241 - DNA, 21 bp, Artificial Sequence
  Synthetic Polynucleotide
agttctccattaacgaattat

SEQ ID NO: 242 - DNA, 21 bp, Artificial Sequence
  Synthetic Polynucleotide
cccaaacaactggcagaattt

SEQ ID NO: 243 - DNA, 21 bp, Artificial Sequence
  Synthetic Polynucleotide
cgatggttgtaataagaagtt

SEQ ID NO: 244 - DNA, 21 bp, Artificial Sequence
  Synthetic Polynucleotide
cccaaacaactggcagaattt

SEQ ID NO: 245 - DNA, 21 bp, Artificial Sequence
  Synthetic Polynucleotide
cctcctgattattcagaatat

SEQ ID NO: 246 - DNA, 21 bp, Artificial Sequence
  Synthetic Polynucleotide
gcctctcctttgtatattatt

SEQ ID NO: 247 - DNA, 21 bp, Artificial Sequence
  Synthetic Polynucleotide
tgagattaagtacacgggctt

SEQ ID NO: 248 - DNA, 21 bp, Artificial Sequence
  Synthetic Polynucleotide
gagaagcaggcaaggtatatt

SEQ ID NO: 249 - DNA, 21 bp, Artificial Sequence
  Synthetic Polynucleotide
gctggcagtaactggcaagaa

SEQ ID NO: 250 - DNA, 21 bp, Artificial Sequence
  Synthetic Polynucleotide
cctcgaagacatcggcagaaa

SEQ ID NO: 251 - DNA, 21 bp, Artificial Sequence
  Synthetic Polynucleotide
gaaccactccactgcctttaa

SEQ ID NO: 252 - DNA, 21 bp, Artificial Sequence
  Synthetic Polynucleotide
gaaccaggttgcaagatttaa

SEQ ID NO: 253 - DNA, 21 bp, Artificial Sequence
  Synthetic Polynucleotide
gcccacaatcaacagtggttt

SEQ ID NO: 254 - DNA, 21 bp, Artificial Sequence
  Synthetic Polynucleotide
cgggatgaacatctacttcta

SEQ ID NO: 255 - DNA, 21 bp, Artificial Sequence
  Synthetic Polynucleotide
ccctacggcatgaattgtaat

SEQ ID NO: 256 - DNA, 21 bp, Artificial Sequence
  Synthetic Polynucleotide
cagactgatatggctgttaat

SEQ ID NO: 257 - DNA, 21 bp, Artificial Sequence
  Synthetic Polynucleotide
cagactgatatggctgttaat

SEQ ID NO: 258 - DNA, 21 bp, Artificial Sequence
  Synthetic Polynucleotide
gacggtatcattccataaata

SEQ ID NO: 259 - DNA, 21 bp, Artificial Sequence
  Synthetic Polynucleotide
gctgtgaagttaaaccgacaa

SEQ ID NO: 260 - DNA, 21 bp, Artificial Sequence
  Synthetic Polynucleotide
gacggtatcattccataaata

SEQ ID NO: 261 - DNA, 21 bp, Artificial Sequence
  Synthetic Polynucleotide
cctcttcgatttagataacaa

SEQ ID NO: 262 - DNA, 21 bp, Artificial Sequence
  Synthetic Polynucleotide
ccgagagagttcatagctctt

SEQ ID NO: 263 - DNA, 21 bp, Artificial Sequence
  Synthetic Polynucleotide
cgaagctctagctgaacagtt

SEQ ID NO: 264 - DNA, 21 bp, Artificial Sequence
  Synthetic Polynucleotide
cgagagagttcatggctcttt

SEQ ID NO: 265 - DNA, 21 bp, Artificial Sequence
  Synthetic Polynucleotide
ctccaggaatttaacaagatt

SEQ ID NO: 266 - DNA, 21 bp, Artificial Sequence
  Synthetic Polynucleotide
cggctcaagaaggaagttgaa

SEQ ID NO: 267 - DNA, 21 bp, Artificial Sequence
  Synthetic Polynucleotide
cgcccgacacattattgagaa

SEQ ID NO: 268 - DNA, 21 bp, Artificial Sequence
  Synthetic Polynucleotide
cgaagaagagtttgacctctt

SEQ ID NO: 269 - DNA, 21 bp, Artificial Sequence
  Synthetic Polynucleotide
gctatcagaataggtatcatt

SEQ ID NO: 270 - DNA, 21 bp, Artificial Sequence
  Synthetic Polynucleotide
ccgtttaccatgagatcctta

SEQ ID NO: 271 - DNA, 21 bp, Artificial Sequence
  Synthetic Polynucleotide
cgtgccaaatatgtctcagat

SEQ ID NO: 272 - DNA, 21 bp, Artificial Sequence
  Synthetic Polynucleotide
taactctggccatagcttaat

SEQ ID NO: 273 - DNA, 17 bp, Artificial Sequence
  Synthetic Polynucleotide
  misc_feature (1)..(17): n is a, c, g, or t
nnnnnnnnnnnnnnnnn

SEQ ID NO: 274 - DNA, 53 bp, Artificial Sequence
  Synthetic Polynucleotide
gctaggttaattgggaccaaactcgagtttggtcccaattaacctagcttttt

SEQ ID NO: 275 - DNA, 53 bp, Artificial Sequence
  Synthetic Polynucleotide
cccaacatagatggaccaaatctcgagatttggtccatctatgttgggttttt

SEQ ID NO: 276 - DNA, 53 bp, Artificial Sequence
  Synthetic Polynucleotide
gccgtcaactagaacatgatactcgagtatcatgttctagttgacggcttttt

SEQ ID NO: 277 - DNA, 53 bp, Artificial Sequence
  Synthetic Polynucleotide
tggtcaaatacttcatcaaatctcgagatttgatgaagtatttgaccattttt

SEQ ID NO: 278 - DNA, 54 bp, Artificial Sequence
  Synthetic Polynucleotide
gccaagtcattatttgaccatctcgagatggtcaaataatgacttggctttttt

SEQ ID NO: 279 - DNA, 54 bp, Artificial Sequence
  Synthetic Polynucleotide
cagatgcacaggccaattaagctcgagcttaattggcctgtgcatctgtttttt

SEQ ID NO: 280 - DNA, 54 bp, Artificial Sequence
  Synthetic Polynucleotide
caagaggaattgatcctaattctcgagaattaggatcaattcctcttgtttttt

SEQ ID NO: 281 - DNA, 54 bp, Artificial Sequence
  Synthetic Polynucleotide
caatgttctcatgttccagttctcgagaactggaacatgagaacattgtttttt

SEQ ID NO: 282 - DNA, 54 bp, Artificial Sequence
  Synthetic Polynucleotide
cctctctcatgagaaccttatctcgagataaggttctcatgagagaggtttttt

SEQ ID NO: 283 - DNA, 54 bp, Artificial Sequence
  Synthetic Polynucleotide
cctttgtaaatacagagcttgctcgagcaagctctgtatttacaaaggtttttt

SEQ ID NO: 284 - DNA, 53 bp, Artificial Sequence
  Synthetic Polynucleotide
ccacgaaacttatactttcaactcgagttgaaagtataagtttcgtggttttt

SEQ ID NO: 285 - DNA, 53 bp, Artificial Sequence
  Synthetic Polynucleotide
gctctatatttctgtctccaactcgagttggagacagaaatatagagcttttt

SEQ ID NO: 286 - DNA, 53 bp, Artificial Sequence
  Synthetic Polynucleotide
catactgggccaagcatatatctcgagatatatgcttggcccagtatgttttt

SEQ ID NO: 287 - DNA, 53 bp, Artificial Sequence
  Synthetic Polynucleotide
atgacccattagctgatatttctcgagaaatatcagctaatgggtcatttttt

SEQ ID NO: 288 - DNA, 69 bp, Artificial Sequence
  Synthetic Polynucleotide
tctccacagctaagaagatcagtatctgtctcgagacagatactgatcttcttagctgtggagattttt

SEQ ID NO: 289 - DNA, 53 bp, Artificial Sequence
  Synthetic Polynucleotide
cctcaacttcaaccctcacttctcgagaagtgagggttgaagttgaggttttt

SEQ ID NO: 290 - DNA, 53 bp, Artificial Sequence
  Synthetic Polynucleotide
cgtttccagatgacaggaattctcgagaattcctgtcatctggaaacgttttt

SEQ ID NO: 291 - DNA, 53 bp, Artificial Sequence
  Synthetic Polynucleotide
cacgtgcaaagtgagctaaagctcgagctttagctcactttgcacgtgttttt

SEQ ID NO: 292 - DNA, 53 bp, Artificial Sequence
  Synthetic Polynucleotide
ttacgaacagaaggactatttctcgagaaatagtccttctgttcgtaattttt

SEQ ID NO: 293 - DNA, 54 bp, Artificial Sequence
  Synthetic Polynucleotide
gagagcacacctattcagcaactcgagttgctgaataggtgtgctctctttttt

SEQ ID NO: 294 - DNA, 54 bp, Artificial Sequence
  Synthetic Polynucleotide
cgagtagagaagttatcagctctcgagagctgataacttctctactcgtttttt

SEQ ID NO: 295 - DNA, 54 bp, Artificial Sequence
  Synthetic Polynucleotide
gcaatgacatacaataggccactcgagtggcctattgtatgtcattgctttttt

SEQ ID NO: 296 - DNA, 53 bp, Artificial Sequence
  Synthetic Polynucleotide
gtacgtgggagagatcattacctcgaggtaatgatctctcccacgtacttttt

SEQ ID NO: 297 - DNA, 53 bp, Artificial Sequence
  Synthetic Polynucleotide
agtcgagtacctgtgcgattactcgagtaatcgcacaggtactcgactttttt

SEQ ID NO: 298 - DNA, 53 bp, Artificial Sequence
  Synthetic Polynucleotide
accctcatgttcagggtggatctcgagatccaccctgaacatgagggtttttt

SEQ ID NO: 299 - DNA, 53 bp, Artificial Sequence
  Synthetic Polynucleotide
cctgaagaatatccggcagttctcgagaactgccggatattcttcaggttttt

SEQ ID NO: 300 - DNA, 53 bp, Artificial Sequence
  Synthetic Polynucleotide
ccagcactataagttccgttactcgagtaacggaacttatagtgctggttttt

SEQ ID NO: 301 - DNA, 53 bp, Artificial Sequence
  Synthetic Polynucleotide
cccacctgaatcatcacctttctcgagaaaggtgatgattcaggtgggttttt

SEQ ID NO: 302 - DNA, 53 bp, Artificial Sequence
  Synthetic Polynucleotide
cctcgcctcaagaaatggaaactcgagtttccatttcttgaggcgaggttttt

SEQ ID NO: 303 - DNA, 53 bp, Artificial Sequence
  Synthetic Polynucleotide
ccagggtttcattctgtctttctcgagaaagacagaatgaaaccctggttttt

SEQ ID NO: 304 - DNA, 53 bp, Artificial Sequence
  Synthetic Polynucleotide
agttctccattaacgaattatctcgagataattcgttaatggagaactttttt

SEQ ID NO: 305 - DNA, 53 bp, Artificial Sequence
  Synthetic Polynucleotide
cccaaacaactggcagaatttctcgagaaattctgccagttgtttgggttttt

SEQ ID NO: 306 - DNA, 53 bp, Artificial Sequence
  Synthetic Polynucleotide
cgatggttgtaataagaagttctcgagaacttcttattacaaccatcgttttt

SEQ ID NO: 307 - DNA, 53 bp, Artificial Sequence; identical to SEQ ID NO: 305
  Synthetic Polynucleotide

SEQ ID NO: 308 - DNA, 53 bp, Artificial Sequence
  Synthetic Polynucleotide
cctcctgattattcagaatatctcgagatattctgaataatcaggaggttttt

SEQ ID NO: 309 - DNA, 53 bp, Artificial Sequence
  Synthetic Polynucleotide
gcctctcctttgtatattattctcgagaataatatacaaaggagaggcttttt

SEQ ID NO: 310 - DNA, 53 bp, Artificial Sequence
  Synthetic Polynucleotide
tgagattaagtacacgggcttctcgagaagcccgtgtacttaatctcattttt

SEQ ID NO: 311 - DNA, 53 bp, Artificial Sequence
  Synthetic Polynucleotide
gagaagcaggcaaggtatattctcgagaatataccttgcctgcttctcttttt

SEQ ID NO: 312 - DNA, 53 bp, Artificial Sequence
  Synthetic Polynucleotide
gctggcagtaactggcaagaactcgagttcttgccagttactgccagcttttt

SEQ ID NO: 313 - DNA, 53 bp, Artificial Sequence
  Synthetic Polynucleotide
cctcgaagacatcggcagaaactcgagtttctgccgatgtcttcgaggttttt

SEQ ID NO: 314 - DNA, 53 bp, Artificial Sequence
  Synthetic Polynucleotide
gaaccactccactgcctttaactcgagttaaaggcagtggagtggttcttttt

SEQ ID NO: 315 - DNA, 53 bp, Artificial Sequence
  Synthetic Polynucleotide
gaaccaggttgcaagatttaactcgagttaaatcttgcaacctggttcttttt

SEQ ID NO: 316 - DNA, 53 bp, Artificial Sequence
  Synthetic Polynucleotide
gcccacaatcaacagtggtttctcgagaaaccactgttgattgtgggcttttt

SEQ ID NO: 317 - DNA, 53 bp, Artificial Sequence
  Synthetic Polynucleotide
cgggatgaacatctacttctactcgagtagaagtagatgttcatcccgttttt

SEQ ID NO: 318 - DNA, 53 bp, Artificial Sequence
  Synthetic Polynucleotide
ccctacggcatgaattgtaatctcgagattacaattcatgccgtagggttttt

SEQ ID NO: 319 - DNA, 54 bp, Artificial Sequence
  Synthetic Polynucleotide
cagactgatatggctgttaatctcgagattaacagccatatcagtctgtttttt

SEQ ID NO: 320 - DNA, 53 bp, Artificial Sequence
  Synthetic Polynucleotide
cagactgatatggctgttaatctcgagattaacagccatatcagtctgttttt

SEQ ID NO: 321 - DNA, 53 bp, Artificial Sequence
  Synthetic Polynucleotide
gacggtatcattccataaatactcgagtatttatggaatgataccgtcttttt

SEQ ID NO: 322 - DNA, 54 bp, Artificial Sequence
  Synthetic Polynucleotide
gctgtgaagttaaaccgacaactcgagttgtcggtttaacttcacagctttttt

SEQ ID NO: 323 - DNA, 54 bp, Artificial Sequence
  Synthetic Polynucleotide
gacggtatcattccataaatactcgagtatttatggaatgataccgtctttttt

SEQ ID NO: 324 - DNA, 53 bp, Artificial Sequence
  Synthetic Polynucleotide
cctcttcgatttagataacaactcgagttgttatctaaatcgaagaggttttt

SEQ ID NO: 325 - DNA, 53 bp, Artificial Sequence
  Synthetic Polynucleotide
ccgagagagttcatagctcttctcgagaagagctatgaactctctcggttttt

SEQ ID NO: 326 - DNA, 53 bp, Artificial Sequence
  Synthetic Polynucleotide
cgaagctctagctgaacagttctcgagaactgttcagctagagcttcgttttt

SEQ ID NO: 327 - DNA, 53 bp, Artificial Sequence
  Synthetic Polynucleotide
cgagagagttcatggctctttctcgagaaagagccatgaactctctcgttttt

SEQ ID NO: 328 - DNA, 53 bp, Artificial Sequence
  Synthetic Polynucleotide
ctccaggaatttaacaagattctcgagaatcttgttaaattcctggagttttt

SEQ ID NO: 329 - DNA, 52 bp, Artificial Sequence
  Synthetic Polynucleotide
cggctcaagaaggaagttgaactcgagttcaacttccttcttgagccgtttt

SEQ ID NO: 330 - DNA, 53 bp, Artificial Sequence
  Synthetic Polynucleotide
cgcccgacacattattgagaactcgagttctcaataatgtgtcgggcgttttt

SEQ ID NO: 331 - DNA, 53 bp, Artificial Sequence
  Synthetic Polynucleotide
cgaagaagagtttgacctcttctcgagaagaggtcaaactcttcttcgttttt

SEQ ID NO: 332 - DNA, 53 bp, Artificial Sequence
  Synthetic Polynucleotide
gctatcagaataggtatcattctcgagaatgatacctattctgatagcttttt

SEQ ID NO: 333 - DNA, 53 bp, Artificial Sequence
  Synthetic Polynucleotide
gcgtttacataaacaaggcatctcgagatgccttgtttatgtaaacgcttttt

SEQ ID NO: 334 - DNA, 53 bp, Artificial Sequence
  Synthetic Polynucleotide
cgtgccaaatatgtctcagatctcgagatctgagacatatttggcacgttttt

SEQ ID NO: 335 - DNA, 53 bp, Artificial Sequence
  Synthetic Polynucleotide
taactctggccatagcttaatctcgagattaagctatggccagagttattttt

SEQ ID NO: 336 - DNA, 16 bp, Artificial Sequence
  Synthetic Polynucleotide
  misc_feature (1)..(16): n is a, c, g, or t
nnnnnnnnnnnnnnnn

SEQ ID NO: 337 - DNA, 7488 bp, Artificial Sequence
  Synthetic Polynucleotide
  misc_feature (3291)..(3294): n is a, c, g, or t
aatgtagtcttatgcaatactcttgtagtcttgcaacatggtaacgatgagttagcaacatgccttacaaggagagaaaaagcaccgtgcatgccgattggtggaagtaaggtggtacgatcgtgccttattaggaaggcaacagacgggtctgacatggattggacgaaccactgaattgccgcattgcagagatattgtatttaagtgcctagctcgatacataaacgggtctctctggttagaccagatctgagcctgggagctctctggctaactagggaacccactgcttaagcctcaataaagcttgccttgagtgcttcaagtagtgtgtgcccgtctgttgtgtgactctggtaactagagatccctcagacccttttagtcagtgtggaaaatctctagcagtggcgcccgaacagggacttgaaagcgaaagggaaaccagaggagctctctcgacgcaggactcggcttgctgaagcgcgcacggcaagaggcgaggggcggcgactggtgagtacgccaaaaattttgactagcggaggctagaaggagagagatgggtgcgagagcgtcagtattaagcgggggagaattagatcgcgatgggaaaaaattcggttaaggccagggggaaagaaaaaatataaattaaaacatatagtatgggcaagcagggagctagaacgattcgcagttaatcctggcctgttagaaacatcagaaggctgtagacaaatactgggacagctacaaccatcccttcagacaggatcagaagaacttagatcattatataatacagtagcaaccctctattgtgtgcatcaaaggatagagataaaagacaccaaggaagctttagacaagatagaggaagagcaaaacaaaagtaagaccaccgcacagcaagcggccgctgatcttcagacctggaggaggagatatgagggacaattggagaagtgaattatataaatataaagtagtaaaaattgaaccattaggagtagcacccaccaaggcaaagagaagagtggtgcagagagaaaaaagagcagtgggaataggagctttgttccttgggttcttgggagcagcaggaagcactatgggcgcagcgtcaatgacgctgacggtacaggccagacaattattgtctggtatagtgcagcagcagaacaatttgctgagggctattgaggcgcaacagcatctgttgcaactcacagtctggggcatcaagcagctccaggcaagaatcctggctgtggaaagatacctaaaggatcaacagctcctggggatttggggttgctctggaaaactcatttgcaccactgctgtgccttggaatgctagttggagtaataaatctctggaacagatttggaatcacacgacctggatggagtgggacagagaaattaacaattacacaagcttaatacactccttaattgaagaatcgcaaaaccagcaagaaaagaatgaacaagaattattggaattagataaatgggcaagtttgtggaattggtttaacataacaaattggctgtggtatataaaattattcataatgatagtaggaggcttggtaggtttaagaatagtttttgctgtactttctatagtgaatagagttaggcagggatattcaccattatcgtttcagacccacctcccaaccccgaggggacccgacaggcccgaaggaatagaagaagaaggtggagagagagacagagacagatccattcgattagtgaacggatctcgacggtatcggttaacttttaaaagaaaaggggggattggggggtacagtgcaggggaaagaatagtagacataatagcaacagacatacaaactaaagaattacaaaaacaaattacaaaattcaaaattttatcgataagctttgcaaagatggataaagttttaaacagagaggaatctttgcagctaatggaccttctaggtcttgaaaggagtgcctcgtgaggctccggtgcccgtcagtgggcagagcgcacatcgcccacagtccccgagaagttggggggaggggtcggcaattgaaccggtgcctagagaaggtggcgcggggtaaactgggaaagtgatgtcgtgtactggctccgcctttttcccgagggtgggggagaaccgtatataagtgcagtagtcgccgtgaacgttctttttcgcaacgggtttgccgccagaacacaggtaagtgccgtgtgtggttcccgcgggcctggcctctttacgggttatggcccttgcgtgccttgaattacttccacctggctgcagtacgtgattcttgatcccgagcttcgggttggaagtgggtgggagagttcgaggccttgcgcttaaggagccccttcgcctcgtgcttgagttgaggcctggcctgggcgctggggccgccgcgtgcgaatctggtggcaccttcgcgcctgtctcgctgctttcgataagtctctagccatttaaaatttttgatgacctgctgcgacgctttttttctggcaagatagtcttgtaaatgcgggccaagatctgcacactggtatttcggtttttggggccgcgggcggcgacggggcccgtgcgtcccagcgcacatgttcggcgaggcggggcctgcgagcgcggccaccgagaatcggacgggggtagtctcaagctggccggcctgctctggtgcctggcctcgcgccgccgtgtatcgccccgccctgggcggcaaggctggcccggtcggcaccagttgcgtgagcggaaagatggccgcttcccggccctgctgcagggagctcaaaatggaggacgcggcgctcgggagagcgggcgggtgagtcacccacacaaaggaaaagggcctttccgtcctcagccgtcgcttcatgtgactccacggagtaccgggcgccgtccaggcacctcgattagttctcgaccttttggagtacgtcgtctttaggttggggggaggggttttatgcgatggagtttccccacactgagtgggtggagactgaagttaggccagcttggcacttgatgtaattctccttggaatttgccctttttgagtttggatcttggttcattctcaagcctcagacagtggttcaaagtttttttcttccatttcaggtgtcgtgaggaattagcttggtactaatacgactcactatagggagacccaagctggctaggtaagcttgatatcgaattcctgcagcccgggggatctgctagcnnnngtcgactccggatgatcagggccctgtacagatatcgacaatcaacctctggattacaaaatttgtgaaagattgactggtattcttaactatgttgctccttttacgctatgtggatacgctgctttaatgcctttgtatcatgctattgcttcccgtatggctttcattttctcctccttgtataaatcctggttgctgtctctttatgaggagttgtggcccgttgtcaggcaacgtggcgtggtgtgcactgtgtttgctgacgcaacccccactggttggggcattgccaccacctgtcagctcctttccgggactttcgctttccccctccctattgccacggcggaactcatcgccgcctgccttgcccgctgctggacaggggctcggctgttgggcactgacaattccgtggtgttgtcggggaagctgacgtcctttccatggctgctcgcctgtgttgccacctggattctgcgcgggacgtccttctgctacgtcccttcggccctcaatccagcggaccttccttcccgcggcctgctgccggctctgcggcctcttccgcgtcttcgccttcgccctcagacgagtcggatctccctttgggccgcctccccgcctggaattcgagctcggtacctttaagaccaatgacttacaaggcagctgtagatcttagccactttttaaaagaaaaggggggactggaagggctaattcactcccaacgaagacaagatctgctttttgcttgtactgggtctctctggttagaccagatctgagcctgggagctctctggctaactagggaacccactgcttaagcctcaataaagcttgccttgagtgcttcaagtagtgtgtgcccgtctgttgtgtgactctggtaactagagatccctcagacccttttagtcagtgtggaaaatctctagcagtagtagttcatgtcatcttattattcagtatttataacttgcaaagaaatgaatatcagagagtgagaggaacttgtttattgcagcttataatggttacaaataaagcaatagcatcacaaatttcacaaataaagcatttttttcactgcattctagttgtggtttgtccaaactcatcaatgtatcttatcatgtctggctctagctatcccgcccctaactccgcccatcccgcccctaactccgcccagttccgcccattctccgccccatggctgactaattttttttatttatgcagaggccgaggccgcctcggcctctgagctattccagaagtagtgaggaggcttttttggaggcctagggacgtacccaattcgccctatagtgagtcgtattacgcgcgctcactggccgtcgttttacaacgtcgtgactgggaaaaccctggcgttacccaacttaatcgccttgcagcacatccccctttcgccagctggcgtaatagcgaagaggcccgcaccgatcgcccttcccaacagttgcgcagcctgaatggcgaatgggacgcgccctgtagcggcgcattaagcgcggcgggtgtggtggttacgcgcagcgtgaccgctacacttgccagcgccctagcgcccgctcctttcgctttcttcccttcctttctcgccacgttcgccggctttccccgtcaagctctaaatcgggggctccctttagggttccgatttagtgctttacggcacctcgaccccaaaaaacttgattagggtgatggttcacgtagtgggccatcgccctgatagacggtttttcgccctttgacgttggagtccacgttctttaatagtggactcttgttccaaactggaacaacactcaaccctatctcggtctattcttttgatttataagggattttgccgatttcggcctattggttaaaaaatgagctgatttaacaaaaatttaacgcgaattttaacaaaatattaacgcttacaatttaggtggcacttttcggggaaatgtgcgcggaacccctatttgtttatttttctaaatacattcaaatatgtatccgctcatgagacaataaccctgataaatgcttcaataatattgaaaaaggaagagtatgagtattcaacatttccgtgtcgcccttattcccttttttgcggcattttgccttcctgtttttgctcacccagaaacgctggtgaaagtaaaagatgctgaagatcagttgggtgcacgagtgggttacatcgaactggatctcaacagcggtaagatccttgagagttttcgccccgaagaacgttttccaatgatgagcacttttaaagttctgctatgtggcgcggtattatcccgtattgacgccgggcaagagcaactcggtcgccgcatacactattctcagaatgacttggttgagtactcaccagtcacagaaaagcatcttacggatggcatgacagtaagagaattatgcagtgctgccataaccatgagtgataacactgcggccaacttacttctgacaacgatcggaggaccgaaggagctaaccgcttttttgcacaacatgggggatcatgtaactcgccttgatcgttgggaaccggagctgaatgaagccataccaaacgacgagcgtgacaccacgatgcctgtagcaatggcaacaacgttgcgcaaactattaactggcgaactacttactctagcttcccggcaacaattaatagactggatggaggcggataaagttgcaggaccacttctgcgctcggcccttccggctggctggtttattgctgataaatctggagccggtgagcgtgggtctcgcggtatcattgcagcactggggccagatggtaagccctcccgtatcgtagttatctacacgacggggagtcaggcaactatggatgaacgaaatagacagatcgctgagataggtgcctcactgattaagcattggtaactgtcagaccaagtttactcatatatactttagattgatttaaaacttcatttttaatttaaaaggatctaggtgaagatcctttttgataatctcatgaccaaaatcccttaacgtgagttttcgttccactgagcgtcagaccccgtagaaaagatcaaaggatcttcttgagatcctttttttctgcgcgtaatctgctgcttgcaaacaaaaaaaccaccgctaccagcggtggtttgtttgccggatcaagagctaccaactctttttccgaaggtaactggcttcagcagagcgcagataccaaatactgttcttctagtgtagccgtagttaggccaccacttcaagaactctgtagcaccgcctacatacctcgctctgctaatcctgttaccagtggctgctgccagtggcgataagtcgtgtcttaccgggttggactcaagacgatagttaccggataaggcgcagcggtcgggctgaacggggggttcgtgcacacagcccagcttggagcgaacgacctacaccgaactgagatacctacagcgtgagctatgagaaagcgccacgcttcccgaagggagaaaggcggacaggtatccggtaagcggcagggtcggaacaggagagcgcacgagggagcttccagggggaaacgcctggtatctttatagtcctgtcgggtttcgccacctctgacttgagcgtcgatttttgtgatgctcgtcaggggggcggagcctatggaaaaacgccagcaacgcggcctttttacggttcctggccttttgctggccttttgctcacatgttctttcctgcgttatcccctgattctgtggataaccgtattaccgcctttgagtgagctgataccgctcgccgcagccgaacgaccgagcgcagcgagtcagtgagcgaggaagcggaagagcgcccaatacgcaaaccgcctctccccgcgcgttggccgattcattaatgcagctggcacgacaggtttcccgactggaaagcgggcagtgagcgcaacgcaattaatgtgagttagctcactcattaggcaccccaggctttacactttatgcttccggctcgtatgttgtgtggaattgtgagcggataacaatttcacacaggaaacagctatgaccatgattacgccaagcgcgcaattaaccctcactaaagggaacaaaagctggagctgcaagctt

SEQ ID NO: 338 - DNA, 6887 bp, Artificial Sequence
  Synthetic Polynucleotide
  misc_feature (3291)..(3294): n is a, c, g, or t
aatgtagtcttatgcaatactcttgtagtcttgcaacatggtaacgatgagttagcaacatgccttacaaggagagaaaaagcaccgtgcatgccgattggtggaagtaaggtggtacgatcgtgccttattaggaaggcaacagacgggtctgacatggattggacgaaccactgaattgccgcattgcagagatattgtatttaagtgcctagctcgatacataaacgggtctctctggttagaccagatctgagcctgggagctctctggctaactagggaacccactgcttaagcctcaataaagcttgccttgagtgcttcaagtagtgtgtgcccgtctgttgtgtgactctggtaactagagatccctcagacccttttagtcagtgtggaaaatctctagcagtggcgcccgaacagggacttgaaagcgaaagggaaaccagaggagctctctcgacgcaggactcggcttgctgaagcgcgcacggcaagaggcgaggggcggcgactggtgagtacgccaaaaattttgactagcggaggctagaaggagagagatgggtgcgagagcgtcagtattaagcgggggagaattagatcgcgatgggaaaaaattcggttaaggccagggggaaagaaaaaatataaattaaaacatatagtatgggcaagcagggagctagaacgattcgcagttaatcctggcctgttagaaacatcagaaggctgtagacaaatactgggacagctacaaccatcccttcagacaggatcagaagaacttagatcattatataatacagtagcaaccctctattgtgtgcatcaaaggatagagataaaagacaccaaggaagctttagacaagatagaggaagagcaaaacaaaagtaagaccaccgcacagcaagcggccgctgatcttcagacctggaggaggagatatgagggacaattggagaagtgaattatataaatataaagtagtaaaaattgaaccattaggagtagcacccaccaaggcaaagagaagagtggtgcagagagaaaaaagagcagtgggaataggagctttgttccttgggttcttgggagcagcaggaagcactatgggcgcagcgtcaatgacgctgacggtacaggccagacaattattgtctggtatagtgcagcagcagaacaatttgctgagggctattgaggcgcaacagcatctgttgcaactcacagtctggggcatcaagcagctccaggcaagaatcctggctgtggaaagatacctaaaggatcaacagctcctggggatttggggttgctctggaaaactcatttgcaccactgctgtgccttggaatgctagttggagtaataaatctctggaacagatttggaatcacacgacctggatggagtgggacagagaaattaacaattacacaagcttaatacactccttaattgaagaatcgcaaaaccagcaagaaaagaatgaacaagaattattggaattagataaatgggcaagtttgtggaattggtttaacataacaaattggctgtggtatataaaattattcataatgatagtaggaggcttggtaggtttaagaatagtttttgctgtactttctatagtgaatagagttaggcagggatattcaccattatcgtttcagacccacctcccaaccccgaggggacccgacaggcccgaaggaatagaagaagaaggtggagagagagacagagacagatccattcgattagtgaacggatctcgacggtatcggttaacttttaaaagaaaaggggggattggggggtacagtgcaggggaaagaatagtagacataatagcaacagacatacaaactaaagaattacaaaaacaaattacaaaattcaaaattttatcgataagctttgcaaagatggataaagttttaaacagagaggaatctttgcagctaatggaccttctaggtcttgaaaggagtgcctcgtgaggctccggtgcccgtcagtgggcagagcgcacatcgcccacagtccccgagaagttggggggaggggtcggcaattgaaccggtgcctagagaaggtggcgcggggtaaactgggaaagtgatgtcgtgtactggctccgcctttttcccgagggtgggggagaaccgtatataagtgcagtagtcgccgtgaacgttctttttcgcaacgggtttgccgccagaacacaggtaagtgccgtgtgtggttcccgcgggcctggcctctttacgggttatggcccttgcgtgccttgaattacttccacctggctgcagtacgtgattcttgatcccgagcttcgggttggaagtgggtgggagagttcgaggccttgcgcttaaggagccccttcgcctcgtgcttgagttgaggcctggcctgggcgctggggccgccgcgtgcgaatctggtggcaccttcgcgcctgtctcgctgctttcgataagtctctagccatttaaaatttttgatgacctgctgcgacgctttttttctggcaagatagtcttgtaaatgcgggccaagatctgcacactggtatttcggtttttggggccgcgggcggcgacggggcccgtgcgtcccagcgcacatgttcggcgaggcggggcctgcgagcgcggccaccgagaatcggacgggggtagtctcaagctggccggcctgctctggtgcctggcctcgcgccgccgtgtatcgccccgccctgggcggcaaggctggcccggtcggcaccagttgcgtgagcggaaagatggccgcttcccggccctgctgcagggagctcaaaatggaggacgcggcgctcgggagagcgggcgggtgagtcacccacacaaaggaaaagggcctttccgtcctcagccgtcgcttcatgtgactccacggagtaccgggcgccgtccaggcacctcgattagttctcgaccttttggagtacgtcgtctttaggttggggggaggggttttatgcgatggagtttccccacactgagtgggtggagactgaagttaggccagcttggcacttgatgtaattctccttggaatttgccctttttgagtttggatcttggttcattctcaagcctcagacagtggttcaaagtttttttcttccatttcaggtgtcgtgaggaattagcttggtactaatacgactcactatagggagacccaagctggctaggtaagcttgatatcgaattcctgcagcccgggggatctgctagcnnnngtcgacggcgaatccggactatagtgtcacctaaatgctagacgtacctttaagaccaatgacttacaaggcagctgtagatcttagccactttttaaaagaaaaggggggactggaagggctaattcactcccaacgaagacaagatctgctttttgcttgtactgggtctctctggttagaccagatctgagcctgggagctctctggctaactagggaacccactgcttaagcctcaataaagcttgccttgagtgcttcaagtagtgtgtgcccgtctgttgtgtgactctggtaactagagatccctcagacccttttagtcagtgtggaaaatctctagcagtagtagttcatgtcatcttattattcagtatttataacttgcaaagaaatgaatatcagagagtgagaggaacttgtttattgcagcttataatggttacaaataaagcaatagcatcacaaatttcacaaataaagcatttttttcactgcattctagttgtggtttgtccaaactcatcaatgtatcttatcatgtctggctctagctatcccgcccctaactccgcccatcccgcccctaactccgcccagttccgcccattctccgccccatggctgactaattttttttatttatgcagaggccgaggccgcctcggcctctgagctattccagaagtagtgaggaggcttttttggaggcctagggacgtacccaattcgccctatagtgagtcgtattacgcgcgctcactggccgtcgttttacaacgtcgtgactgggaaaaccctggcgttacccaacttaatcgccttgcagcacatccccctttcgccagctggcgtaatagcgaagaggcccgcaccgatcgcccttcccaacagttgcgcagcctgaatggcgaatgggacgcgccctgtagcggcgcattaagcgcggcgggtgtggtggttacgcgcagcgtgaccgctacacttgccagcgccctagcgcccgctcctttcgctttcttcccttcctttctcgccacgttcgccggctttccccgtcaagctctaaatcgggggctccctttagggttccgatttagtgctttacggcacctcgaccccaaaaaacttgattagggtgatggttcacgtagtgggccatcgccctgatagacggtttttcgccctttgacgttggagtccacgttctttaatagtggactcttgttccaaactggaacaacactcaaccctatctcggtctattcttttgatttataagggattttgccgatttcggcctattggttaaaaaatgagctgatttaacaaaaatttaacgcgaattttaacaaaatattaacgcttacaatttaggtggcacttttcggggaaatgtgcgcggaacccctatttgtttatttttctaaatacattcaaatatgtatccgctcatgagacaataaccctgataaatgcttcaataatattgaaaaaggaagagtatgagtattcaacatttccgtgtcgcccttattcccttttttgcggcattttgccttcctgtttttgctcacccagaaacgctggtgaaagtaaaagatgctgaagatcagttgggtgcacgagtgggttacatcgaactggatctcaacagcggtaagatccttgagagttttcgccccgaagaacgttttccaatgatgagcacttttaaagttctgctatgtggcgcggtattatcccgtattgacgccgggcaagagcaactcggtcgccgcatacactattctcagaatgacttggttgagtactcaccagtcacagaaaagcatcttacggatggcatgacagtaagagaattatgcagtgctgccataaccatgagtgataacactgcggccaacttacttctgacaacgatcggaggaccgaaggagctaaccgcttttttgcacaacatgggggatcatgtaactcgccttgatcgttgggaaccggagctgaatgaagccataccaaacgacgagcgtgacaccacgatgcctgtagcaatggcaacaacgttgcgcaaactattaactggcgaactacttactctagcttcccggcaacaattaatagactggatggaggcggataaagttgcaggaccacttctgcgctcggcccttccggctggctggtttattgctgataaatctggagccggtgagcgtgggtctcgcggtatcattgcagcactggggccagatggtaagccctcccgtatcgtagttatctacacgacggggagtcaggcaactatggatgaacgaaatagacagatcgctgagataggtgcctcactgattaagcattggtaactgtcagaccaagtttactcatatatactttagattgatttaaaacttcatttttaatttaaaaggatctaggtgaagatcctttttgataatctcatgaccaaaatcccttaacgtgagttttcgttccactgagcgtcagaccccgtagaaaagatcaaaggatcttcttgagatcctttttttctgcgcgtaatctgctgcttgcaaacaaaaaaaccaccgctaccagcggtggtttgtttgccggatcaagagctaccaactctttttccgaaggtaactggcttcagcagagcgcagataccaaatactgttcttctagtgtagccgtagttaggccaccacttcaagaactctgtagcaccgcctacatacctcgctctgctaatcctgttaccagtggctgctgccagtggcgataagtcgtgtcttaccgggttggactcaagacgatagttaccggataaggcgcagcggtcgggctgaacggggggttcgtgcacacagcccagcttggagcgaacgacctacaccgaactgagatacctacagcgtgagctatgagaaagcgccacgcttcccgaagggagaaaggcggacaggtatccggtaagcggcagggtcggaacaggagagcgcacgagggagcttccagggggaaacgcctggtatctttatagtcctgtcgggtttcgccacctctgacttgagcgtcgatttttgtgatgctcgtcaggggggcggagcctatggaaaaacgccagcaacgcggcctttttacggttcctggccttttgctggccttttgctcacatgttctttcctgcgttatcccctgattctgtggataaccgtattaccgcctttgagtgagctgataccgctcgccgcagccgaacgaccgagcgcagcgagtcagtgagcgaggaagcggaagagcgcccaatacgcaaaccgcctctccccgcgcgttggccgattcattaatgcagctggcacgacaggtttcccgactggaaagcgggcagtgagcgcaacgcaattaatgtgagttagctcactcattaggcaccccaggctttacactttatgcttccggctcgtatgttgtgtggaattgtgagcggataacaatttcacacaggaaacagctatgaccatgattacgccaagcgcgcaattaaccctcactaaagggaacaaaagctggagctgcaagctt

SEQ ID NO: 339 - DNA, 1183 bp, Artificial Sequence
  Synthetic Polynucleotide
gtgaggctccggtgcccgtcagtgggcagagcgcacatcgcccacagtccccgagaagttggggggaggggtcggcaattgaaccggtgcctagagaaggtggcgcggggtaaactgggaaagtgatgtcgtgtactggctccgcctttttcccgagggtgggggagaaccgtatataagtgcagtagtcgccgtgaacgttctttttcgcaacgggtttgccgccagaacacaggtaagtgccgtgtgtggttcccgcgggcctggcctctttacgggttatggcccttgcgtgccttgaattacttccacctggctgcagtacgtgattcttgatcccgagcttcgggttggaagtgggtgggagagttcgaggccttgcgcttaaggagccccttcgcctcgtgcttgagttgaggcctggcctgggcgctggggccgccgcgtgcgaatctggtggcaccttcgcgcctgtctcgctgctttcgataagtctctagccatttaaaatttttgatgacctgctgcgacgctttttttctggcaagatagtcttgtaaatgcgggccaagatctgcacactggtatttcggtttttggggccgcgggcggcgacggggcccgtgcgtcccagcgcacatgttcggcgaggcggggcctgcgagcgcggccaccgagaatcggacgggggtagtctcaagctggccggcctgctctggtgcctggcctcgcgccgccgtgtatcgccccgccctgggcggcaaggctggcccggtcggcaccagttgcgtgagcggaaagatggccgcttcccggccctgctgcagggagctcaaaatggaggacgcggcgctcgggagagcgggcgggtgagtcacccacacaaaggaaaagggcctttccgtcctcagccgtcgcttcatgtgactccacggagtaccgggcgccgtccaggcacctcgattagttctcgaccttttggagtacgtcgtctttaggttggggggaggggttttatgcgatggagtttccccacactgagtgggtggagactgaagttaggccagcttggcacttgatgtaattctccttggaatttgccctttttgagtttggatcttggttcattctcaagcctcagacagtggttcaaagtttttttcttccatttcaggtgtcgtga

SEQ ID NO: 340 - DNA, 226 bp, Artificial Sequence
  Synthetic Polynucleotide
ccagacatgataagatacattgatgagtttggacaaaccacaactagaatgcagtgaaaaaaatgctttatttgtgaaatttgtgatgctattgctttatttgtaaccattataagctgcaataaacaagttaacaacaacaattgcattcattttatgtttcaggttcagggggaggtgtgggaggttttttaaagcaagtaaaacctctacaaatgtggtatgg

SEQ ID NO: 341 - DNA, 2000 bp, Artificial Sequence
  Synthetic Polynucleotide
aaaaaaaaaaaaaaaaaaaaaaaaaaaaaaaaaaaaaaaaaaaaaaaaaaaaaaaaaaaaaaaaaaaaaaaaaaaaaaaaaaaaaaaaaaaaaaaaaaaaaaaaaaaaaaaaaaaaaaaaaaaaaaaaaaaaaaaaaaaaaaaaaaaaaaaaaaaaaaaaaaaaaaaaaaaaaaaaaaaaaaaaaaaaaaaaaaaaaaaaaaaaaaaaaaaaaaaaaaaaaaaaaaaaaaaaaaaaaaaaaaaaaaaaaaaaaaaaaaaaaaaaaaaaaaaaaaaaaaaaaaaaaaaaaaaaaaaaaaaaaaaaaaaaaaaaaaaaaaaaaaaaaaaaaaaaaaaaaaaaaaaaaaaaaaaaaaaaaaaaaaaaaaaaaaaaaaaaaaaaaaaaaaaaaaaaaaaaaaaaaaaaaaaaaaaaaaaaaaaaaaaaaaaaaaaaaaaaaaaaaaaaaaaaaaaaaaaaaaaaaaaaaaaaaaaaaaaaaaaaaaaaaaaaaaaaaaaaaaaaaaaaaaaaaaaaaaaaaaaaaaaaaaaaaaaaaaaaaaaaaaaaaaaaaaaaaaaaaaaaaaaaaaaaaaaaaaaaaaaaaaaaaaaaaaaaaaaaaaaaaaaaaaaaaaaaaaaaaaaaaaaaaaaaaaaaaaaaaaaaaaaaaaaaaaaaaaaaaaaaaaaaaaaaaaaaaaaaaaaaaaaaaaaaaaaaaaaaaaaaaaaaaaaaaaaaaaaaaaaaaaaaaaaaaaaaaaaaaaaaaaaaaaaaaaaaaaaaaaaaaaaaaaaaaaaaaaaaaaaaaaaaaaaaaaaaaaaaaaaaaaaaaaaaaaaaaaaaaaaaaaaaaaaaaaaaaaaaaaaaaaaaaaaaaaaaaaaaaaaaaaaaaaaaaaaaaaaaaaaaaaaaaaaaaaaaaaaaaaaaaaaaaaaaaaaaaaaaaaaaaaaaaaaaaaaaaaaaaaaaaaaaaaaaaaaaaaaaaaaaaaaaaaaaaaaaaaaaaaaaaaaaaaaaaaaaaaaaaaaaaaaaaaaaaaaaaaaaaaaaaaaaaaaaaaaaaaaaaaaaaaaaaaaaaaaaaaaaaaaaaaaaaaaaaaaaaaaaaaaaaaaaaaaaaaaaaaaaaaaaaaaaaaaaaaaaaaaaaaaaaaaaaaaaaaaaaaaaaaaaaaaaaaaaaaaaaaaaaaaaaaaaaaaaaaaaaaaaaaaaaaaaaaaaaaaaaaaaaaaaaaaaaaaaaaaaaaaaaaaaaaaaaaaaaaaaaaaaaaaaaaaaaaaaaaaaaaaaaaaaaaaaaaaaaaaaaaaaaaaaaaaaaaaaaaaaaaaaaaaaaaaaaaaaaaaaaaaaaaaaaaaaaaaaaaaaaaaaaaaaaaaaaaaaaaaaaaaaaaaaaaaaaaaaaaaaaaaaaaaaaaaaaaaaaaaaaaaaaaaaaaaaaaaaaaaaaaaaaaaaaaaaaaaaaaaaaaaaaaaaaaaaaaaaaaaaaaaaaaaaaaaaaaaaaaaaaaaaaaaaaaaaaaaaaaaaaaaaaaaaaaaaaaaaaaaaaaaaaaaaaaaaaaaaaaaaaaaaaaaaaaaaaaaaaaaaaaaaaaaaaaaaaaaaaaaaaaaaaaaaaaaaaaaaaaaaaaaaaaaaaaaaaaaaaaaaaaaaaaaaaaaaaaaaaaaaaaaaaaaaaaaaaaaaaaaaaaaaaaaaaaaaaaaaaaaaaaaaaaaaaaaaaaaaaaaaaaaaaaaaaaaaaaaaaaaaaaaaaaaaaaaaaaaaaaaaaaaaaaaaaaaaaaaaaaaaaaaaaaaaaaaaaaaaaaaaaaaaaaaaaaaaaaaaaaaaaaaaaaaaaaaaaaaaaaaaaaaaaaaaaaaaaaaaaaaaaaaaaaaaaaaaaaaaaaaaaaaaaaaaaaaaaaaaaaaaaaaaaaaaaaaaaaaaaaaaaaaaaaaaaaaaaaaaaaaaaaaaaaaaaaaaaaaaaaaaaaaaaaaaaaaaaaaaaaaaaaaaaaaaaaaaaaaaaaaaaaaaaaaaaaaaaaaaaaaaaaaaaaaa

SEQ ID NO: 342 - DNA, 1358 bp, Artificial Sequence
  Synthetic Polynucleotide
aaaaaaaaaaaaaaaaaaaaaaaaaaaaaaaaaaaaaaaaaaaaaaaaaaaaaaaaaaaaaaaaaaaaaaaaaaaaaaaaaaaaaaaaaaaaaaaaaaaaaaaaaaaaaaaaaaaaaaaaaaaaaaaaaaaaaaaaaaaaaaaaaaaaaaaaaaaaaaaaaaaaaaaaaaaaaaaaaaaaaaaaaaaaaaaaaaaaaaaaaaaaaaaaaaaaaaaaaaaaaaaaaaaaaaaaaaaaaaaaaaaaaaaaaaaaaaaaaaaaaaaaaaaaaaaaaaaaaaaaaaaaaaaaaaaaaaaaaaaaaaaaaaaaaaaaaaaaaaaaaaaaaaaaaaaaaaaaaaaaaaaaaaaaaaaaaaaaaaaaaaaaaaaaaaaaaaaaaaaaaaaaaaaaaaaaaaaaaaaaaaaaaaaaaaaaaaaaaaaaaaaaaaaaaaaaaaaaaaaaaaaaaaaaaaaaaaaaaaaaaaaaaaaaaaaaaaaaaaaaaaaaaaaaaaaaaaaaaaaaaaaaaaaaaaaaaaaaaaaaaaaaaaaaaaaaaaaaaaaaaaaaaaaaaaaaaaaaaaaaaaaaaaaaaaaaaaaaaaaaaaaaaaaaaaaaaaaaaaaaaaaaaaaaaaaaaaaaaaaaaaaaaaaaaaaaaaaaaaaaaaaaaaaaaaaaaaaaaaaaaaaaaaaaaaaaaaaaaaaaaaaaaaaaaaaaaaaaaaaaaaaaaaaaaaaaaaaaaaaaaaaaaaaaaaaaaaaaaaaaaaaaaaaaaaaaaaaaaaaaaaaaaaaaaaaaaaaaaaaaaaaaaaaaaaaaaaaaaaaaaaaaaaaaaaaaaaaaaaaaaaaaaaaaaaaaaaaaaaaaaaaaaaaaaaaaaaaaaaaaaaaaaaaaaaaaaaaaaaaaaaaaaaaaaaaaaaaaaaaaaaaaaaaaaaaaaaaaaaaaaaaaaaaaaaaaaaaaaaaaaaaaaaaaaaaaaaaaaaaaaaaaaaaaaaaaaaaaaaaaaaaaaaaaaaaaaaaaaaaaaaaaaaaaaaaaaaaaaaaaaaaaaaaaaaaaaaaaaaaaaaaaaaaaaaaaaaaaaaaaaaaaaaaaaaaaaaaaaaaaaaaaaaaaaaaaaaaaaaaaaaaaaaaaaaaaaaaaaaaaaaaaaaaaaaaaaaaaaaaaaaaaaaaaaaaaaaaaaaaaaaaaaaaaaaaaaaaaaaaaaaaaaaaaaaaaaaaaaaaaaaaaaaaaaaaaaaaaaaaaaaaaaaaaaaaaaaaaaaaaaaaaaaaaaaaaaaaaaaaaaaaaaaaaaaaaaaaaaaaaaaaaaaaaaaaaaaaaaaaaaaaaaaaaaaaaaaaaaaaaaaaaaaaaaaaaaaaaaaaaaaaaaaaaaaaaaaaaaa

SEQ ID NO: 343 - DNA, 5016 bp, Artificial Sequence
  Synthetic Polynucleotide
tttttttttttttttttttttttttttttttttttttttttttttttttttttttttttttttttttttttttttttttttttttttttttttttttttttttttttttttttttttttttttttttttttttttttttttttttttttttttttttttttttttttttttttttttttttttttttttttttttttttttttttttttttttttttttttttttttttttttttttttttttttttttttttttttttttttttttttttttttttttttttttttttttttttttttttttttttttttttttttttttttttttttttttttttttttttttttttttttttttttttttttttttttttttttttttttttttttttttttttttttttttttttttttttttttttttttttttttttttttttttttttttttttttttttttttttttttttttttttttttttttttttttttttttttttttttttttttttttttttttttttttttttttttttttttttttttttttttttttttttttttttttttttttttttttttttttttttttttttttttttttttttttttttttttttttttttttttttttttttttttttttttttttttttttttttttttttttttttttttttttttttttttttttttttttttttttttttttttttttttttttttttttttttttttttttttttttttttttttttttttttttttttttttttttttttttttttttttttttttttttttttttttttttttttttttttttttttttttttttttttttttttttttttttttttttttttttttttttttttttttttttttttttttttttttttttttttttttttttttttttttttttttttttttttttttttttttttttttttttttttttttttttttttttttttttttttttttttttttttttttttttttttttttttttttttttttttttttttttttttttttttttttttttttttttttttttttttttttttttttttttttttttttttttttttttttttttttttttttttttttttttttttttttttttttttttttttttttttttttttttttttttttttttttttttttttttttttttttttttttttttttttttttttttttttttttttttttttttttttttttttttttttttttttttttttttttttttttttttttttttttttttttttttttttttttttttttttttttttttttttttttttttttttttttttttttttttttttttttttttttttttttttttttttttttttttttttttttttttttttttttttttttttttttttttttttttttttttttttttttttttttttttttttttttttttttttttttttttttttttttttttttttttttttttttttttttttttttttttttttttttttttttttttttttttttttttttttttttttttttttttttttttttttttttttttttttttttttttttttttttttttttttttttttttttttttttttttttttttttttttttttttttttttttttttttttttttttttttttttttttttttttttttttttttttttttttttttttttttttttttttttttttttttttttttttttttttttttttttttttttttttttttttttttttttttttttttttttttttttttttttttttttttttttttttttttttttttttttttttttttttttttttttttttttttttttttttttttttttttttttttttttttttttttttttttttttttttttttttttttttttttttttttttttttttttttttttttttttttttttttttttttttttttttttttttttttttttttttttttttttttttttttttttttttttttttttttttttttttttttttttttttttttttttttttttttttttttttttttttttttttttttttttttttttttttttttttttttttttttttttttttttttttttttttttttttttttttttttttttttttttttttttttttttttttttttttttttttttttttttttttttttttttttttttttttttttttttttttttttttttttttttttttttttttttttttttttttttttttttttttttttttttttttttttttttttttttttttttttttttttttttttttttttttttttttttttttttttttttttttttttttttttttttttttttttttttttttttttttttttttttttttttttttttttttttttttttttttttttttttttttttttttttttttttttttttttttttttttttttttttttttttttttttttttttttttttttttttttttttttttttttttttttttttttttttttttttttttttttttttttttttttttttttttttttttttttttttttttttttttttttttttttttttttttttttttttttttttttttttttttttttttttttttttttttttttttttttttttttttttttttttttttttttttttttttttttttttttttttttttttttttttttttttttttttttttttttttttttttttttttttttttttttttttttttttttttttttttttttttttttttttttttttttttttttttttttttttttttttttttttttttttttttttttttttttttttttttttttttttttttttttttttttttttttttttttttttttttttttttttttttttttttttttttttttttttttttttttttttttttttttttttttttttttttttttttttttttttttttttttttttttttttttttttttttttttttttttttttttttttttttttttttttttttttttttttttttttttttttttttttttttttttttttttttttttttttttttttttttttttttttttttttttttttttttttttttttttttttttttttttttttttttttttttttttttttttttttttttttttttttttttttttttttttttttttttttttttttttttttttttttttttttttttttttttttttttttttttttttttttttttttttttttttttttttttttttttttttttttttttttttttttttttttttttttttttttttttttttttttttttttttttttttttttttttttttttttttttttttttttttttttttttttttttttttttttttttttttttttttttttttttttttttttttttttttttttttttttttttttttttttttttttttttttttttttttttttttttttttttttttttttttttttttttttttttttttttttttttttttttttttttttttttttttttttttttttttttttttttttttttttttttttttttttttttttttttttttttttttttttttttttttttttttttttttttttttttttttttttttttttttttttttttttttttttttttttttttttttttttttttttttttttttttttttttttttttttttttttttttttttttttttttttttttttttttttttttttttttttttttttttttttttttttttttttttttttttttttttttttttttttttttttttttttttttttttttttttttttttttttttttttttttttttttttttttttttttttttttttttttttttttttttttttttttttttttttttttttttttttttttttttttttttttttttttttttttttttttttttttttttttttttttttttttttttttttttttttttttttttttttttttttttttttttttttttttttttttttttttttttttttttttttttttttttttttttttttttttttttttttttttttttttttttttttttttttttttttttttttttttttttttttttttttttttttttttttttttttttttttttttttttttttttttttttttttttttttttttttttttttttttttttttttttttttttttttttttttttttttttttttttttttttttttttttttttttttttttttttttttttttttttttttttttttttttttttttttttttttttttttttttttttttttttttttttttttttttttttttttttttttttttttttttttttttttttttttttttttttttttttttttttttttttttttttttttttttttttttttttttttttttttttttttttttttttttttttttttttttttttttttttttttttttttttttttttttttttttttttttttttttttttttttttttttttttttttttttttttttttttttttttttttttttttttttttttttttttttttttttttttttttttttttttttttttttttttttttttttttttttttttttttttttttttttttttttttttttttttttttttttttttttttttttttttttttttttttttttttttttttttttttttttttttttttttttttttttttttttttttttttttttttttttttttttttttttttttttttttttttttttttttttttttttttttttttttttttttttttttttttttttttttttttttttttttttttttttttttttttttttttttttttttttttttttttttttttttttttttttttttttttttttttttttttttttttttttttttttttttttttttttttttttttttttttt

SEQ ID NO: 344 - DNA, 10 bp, Artificial Sequence
  Synthetic Polynucleotide
aaacaaacac

SEQ ID NO: 345 - DNA, 10 bp, Artificial Sequence
  Synthetic Polynucleotide
aaacaagggt

SEQ ID NO: 346 - DNA, 10 bp, Artificial Sequence
  Synthetic Polynucleotide
aaacatctct

SEQ ID NO: 347 - DNA, 10 bp, Artificial Sequence
  Synthetic Polynucleotide
aaaccctgac

SEQ ID NO: 348 - DNA, 10 bp, Artificial Sequence
  Synthetic Polynucleotide
aaacgggaac

SEQ ID NO: 349 - DNA, 10 bp, Artificial Sequence
  Synthetic Polynucleotide
aaagacagta

SEQ ID NO: 350 - DNA, 9541 bp, Artificial Sequence
  Synthetic Polynucleotide
aatgtagtcttatgcaatactcttgtagtcttgcaacatggtaacgatgagttagcaacatgccttacaaggagagaaaaagcaccgtgcatgccgattggtggaagtaaggtggtacgatcgtgccttattaggaaggcaacagacgggtctgacatggattggacgaaccactgaattgccgcattgcagagatattgtatttaagtgcctagctcgatacataaacgggtctctctggttagaccagatctgagcctgggagctctctggctaactagggaacccactgcttaagcctcaataaagcttgccttgagtgcttcaagtagtgtgtgcccgtctgttgtgtgactctggtaactagagatccctcagacccttttagtcagtgtggaaaatctctagcagtggcgcccgaacagggacttgaaagcgaaagggaaaccagaggagctctctcgacgcaggactcggcttgctgaagcgcgcacggcaagaggcgaggggcggcgactggtgagtacgccaaaaattttgactagcggaggctagaaggagagagatgggtgcgagagcgtcagtattaagcgggggagaattagatcgcgatgggaaaaaattcggttaaggccagggggaaagaaaaaatataaattaaaacatatagtatgggcaagcagggagctagaacgattcgcagttaatcctggcctgttagaaacatcagaaggctgtagacaaatactgggacagctacaaccatcccttcagacaggatcagaagaacttagatcattatataatacagtagcaaccctctattgtgtgcatcaaaggatagagataaaagacaccaaggaagctttagacaagatagaggaagagcaaaacaaaagtaagaccaccgcacagcaagcggccgctgatcttcagacctggaggaggagatatgagggacaattggagaagtgaattatataaatataaagtagtaaaaattgaaccattaggagtagcacccaccaaggcaaagagaagagtggtgcagagagaaaaaagagcagtgggaataggagctttgttccttgggttcttgggagcagcaggaagcactatgggcgcagcgtcaatgacgctgacggtacaggccagacaattattgtctggtatagtgcagcagcagaacaatttgctgagggctattgaggcgcaacagcatctgttgcaactcacagtctggggcatcaagcagctccaggcaagaatcctggctgtggaaagatacctaaaggatcaacagctcctggggatttggggttgctctggaaaactcatttgcaccactgctgtgccttggaatgctagttggagtaataaatctctggaacagatttggaatcacacgacctggatggagtgggacagagaaattaacaattacacaagcttaatacactccttaattgaagaatcgcaaaaccagcaagaaaagaatgaacaagaattattggaattagataaatgggcaagtttgtggaattggtttaacataacaaattggctgtggtatataaaattattcataatgatagtaggaggcttggtaggtttaagaatagtttttgctgtactttctatagtgaatagagttaggcagggatattcaccattatcgtttcagacccacctcccaaccccgaggggacccgacaggcccgaaggaatagaagaagaaggtggagagagagacagagacagatccattcgattagtgaacggatctcgacggtatcggttaacttttaaaagaaaaggggggattggggggtacagtgcaggggaaagaatagtagacataatagcaacagacatacaaactaaagaattacaaaaacaaattacaaaattcaaaattttatcgataagctttgcaaagatggataaagttttaaacagagaggaatctttgcagctaatggaccttctaggtcttgaaaggagtgcctcgtgaggctccggtgcccgtcagtgggcagagcgcacatcgcccacagtccccgagaagttggggggaggggtcggcaattgaaccggtgcctagagaaggtggcgcggggtaaactgggaaagtgatgtcgtgtactggctccgcctttttcccgagggtgggggagaaccgtatataagtgcagtagtcgccgtgaacgttctttttcgcaacgggtttgccgccagaacacaggtaagtgccgtgtgtggttcccgcgggcctggcctctttacgggttatggcccttgcgtgccttgaattacttccacctggctgcagtacgtgattcttgatcccgagcttcgggttggaagtgggtgggagagttcgaggccttgcgcttaaggagccccttcgcctcgtgcttgagttgaggcctggcctgggcgctggggccgccgcgtgcgaatctggtggcaccttcgcgcctgtctcgctgctttcgataagtctctagccatttaaaatttttgatgacctgctgcgacgctttttttctggcaagatagtcttgtaaatgcgggccaagatctgcacactggtatttcggtttttggggccgcgggcggcgacggggcccgtgcgtcccagcgcacatgttcggcgaggcggggcctgcgagcgcggccaccgagaatcggacgggggtagtctcaagctggccggcctgctctggtgcctggcctcgcgccgccgtgtatcgccccgccctgggcggcaaggctggcccggtcggcaccagttgcgtgagcggaaagatggccgcttcccggccctgctgcagggagctcaaaatggaggacgcggcgctcgggagagcgggcgggtgagtcacccacacaaaggaaaagggcctttccgtcctcagccgtcgcttcatgtgactccacggagtaccgggcgccgtccaggcacctcgattagttctcgaccttttggagtacgtcgtctttaggttggggggaggggttttatgcgatggagtttccccacactgagtgggtggagactgaagttaggccagcttggcacttgatgtaattctccttggaatttgccctttttgagtttggatcttggttcattctcaagcctcagacagtggttcaaagtttttttcttccatttcaggtgtcgtgaggaattagcttggtactaatacgactcactatagggagacccaagctggctagttaagcttgatatcgaattcctgcagcccgggggatctgctagcatggccttaccagtgaccgccttgctcctgccgctggccttgctgctccacgccgccaggccggacatccagatgacacagactacatcctccctgtctgcctctctgggagacagagtcaccatcagttgcagggcaagtcaggacattagtaaatatttaaattggtatcagcagaaaccagatggaactgttaaactcctgatctaccatacatcaagattacactcaggagtcccatcaaggttcagtggcagtgggtctggaacagattattctctcaccattagcaacctggagcaagaagatattgccacttacttttgccaacagggtaatacgcttccgtacacgttcggaggggggaccaagctggagatcacaggtggcggtggctcgggcggtggtgggtcgggtggcggcggatctgaggtgaaactgcaggagtcaggacctggcctggtggcgccctcacagagcctgtccgtcacatgcactgtctcaggggtctcattacccgactatggtgtaagctggattcgccagcctccacgaaagggtctggagtggctgggagtaatatggggtagtgaaaccacatactataattcagctctcaaatccagactgaccatcatcaaggacaactccaagagccaagttttcttaaaaatgaacagtctgcaaactgatgacacagccatttactactgtgccaaacattattactacggtggtagctatgctatggactactggggtcaaggaacctcagtcaccgtctcctcacgcgtaggaggcagtggtgtcttcacactcgaagatttcgttggggactggcgacagacagccggctacaacctggaccaagtccttgaacagggaggtgtgtccagtttgtttcagaatctcggggtgtccgtaactccgatccaaaggattgtcctgagcggtgaaaatgggctgaagatcgacatccatgtcatcatcccgtatgaaggtctgagcggcgaccaaatgggccagatcgaaaaaatttttaaggtggtgtaccctgtggatgatcatcactttaaggtgatcctgcactatggcacactggtaatcgacggggttacgccgaacatgatcgactatttcggacggccgtatgaaggcatcgccgtgttcgacggcaaaaagatcactgtaacagggaccctgtggaacggcaacaaaattatcgacgagcgcctgatcaaccccgacggctccctgctgttccgagtaaccatcaacggagtgaccggctggcggctgtgcgaacgcattctggcgagttggaaggatgcctctggatggtcctcgagaccgatttctacgactacaaggacgacgatgacaagactagtggctccggcgagggcagaggaagtctactaacctgcggagatgtggaagaaaatcctggcccacatatgaccgagtacaagcccacggtgcgcctcgccacccgcgacgacgtccccagggccgtacgcaccctcgccgccgcgttcgccgactaccccgccacgcgccacaccgtcgatccggaccgccacatcgagcgggtcaccgagctgcaagaactcttcctcacgcgcgtcgggctcgacatcggcaaggtgtgggtcgcggacgacggcgccgcggtggcggtctggaccacgccggagagcgtcgaagcgggggcggtgttcgccgagatcggcccgcgcatggccgagttgagcggttcccggctggccgcgcagcaacagatggaaggcctcctggcgccgcaccggcccaaggagcccgcgtggttcctggccaccgtcggcgtctcgcccgaccaccagggcaagggtctgggcagcgccgtcgtgctccccggagtggaggcggccgagcgcgccggggtgcccgccttcctggagacctccgcgccccgcaacctccccttctacgagcggctcggcttcaccgtcaccgccgacgtcgaggtgcccgaaggaccgcgcacctggtgcatgacccgcaagcccggtgcctgagtcgactccggatgatcagggccctgtacagatatcgacaatcaacctctggattacaaaatttgtgaaagattgactggtattcttaactatgttgctccttttacgctatgtggatacgctgctttaatgcctttgtatcatgctattgcttcccgtatggctttcattttctcctccttgtataaatcctggttgctgtctctttatgaggagttgtggcccgttgtcaggcaacgtggcgtggtgtgcactgtgtttgctgacgcaacccccactggttggggcattgccaccacctgtcagctcctttccgggactttcgctttccccctccctattgccacggcggaactcatcgccgcctgccttgcccgctgctggacaggggctcggctgttgggcactgacaattccgtggtgttgtcggggaagctgacgtcctttccatggctgctcgcctgtgttgccacctggattctgcgcgggacgtccttctgctacgtcccttcggccctcaatccagcggaccttccttcccgcggcctgctgccggctctgcggcctcttccgcgtcttcgccttcgccctcagacgagtcggatctccctttgggccgcctccccgcctggaattcgagctcggtacctttaagaccaatgacttacaaggcagctgtagatcttagccactttttaaaagaaaaggggggactggaagggctaattcactcccaacgaagacaagatctgctttttgcttgtactgggtctctctggttagaccagatctgagcctgggagctctctggctaactagggaacccactgcttaagcctcaataaagcttgccttgagtgcttcaagtagtgtgtgcccgtctgttgtgtgactctggtaactagagatccctcagacccttttagtcagtgtggaaaatctctagcagtagtagttcatgtcatcttattattcagtatttataacttgcaaagaaatgaatatcagagagtgagaggaacttgtttattgcagcttataatggttacaaataaagcaatagcatcacaaatttcacaaataaagcatttttttcactgcattctagttgtggtttgtccaaactcatcaatgtatcttatcatgtctggctctagctatcccgcccctaactccgcccatcccgcccctaactccgcccagttccgcccattctccgccccatggctgactaattttttttatttatgcagaggccgaggccgcctcggcctctgagctattccagaagtagtgaggaggcttttttggaggcctagggacgtacccaattcgccctatagtgagtcgtattacgcgcgctcactggccgtcgttttacaacgtcgtgactgggaaaaccctggcgttacccaacttaatcgccttgcagcacatccccctttcgccagctggcgtaatagcgaagaggcccgcaccgatcgcccttcccaacagttgcgcagcctgaatggcgaatgggacgcgccctgtagcggcgcattaagcgcggcgggtgtggtggttacgcgcagcgtgaccgctacacttgccagcgccctagcgcccgctcctttcgctttcttcccttcctttctcgccacgttcgccggctttccccgtcaagctctaaatcgggggctccctttagggttccgatttagtgctttacggcacctcgaccccaaaaaacttgattagggtgatggttcacgtagtgggccatcgccctgatagacggtttttcgccctttgacgttggagtccacgttctttaatagtggactcttgttccaaactggaacaacactcaaccctatctcggtctattcttttgatttataagggattttgccgatttcggcctattggttaaaaaatgagctgatttaacaaaaatttaacgcgaattttaacaaaatattaacgcttacaatttaggtggcacttttcggggaaatgtgcgcggaacccctatttgtttatttttctaaatacattcaaatatgtatccgctcatgagacaataaccctgataaatgcttcaataatattgaaaaaggaagagtatgagtattcaacatttccgtgtcgcccttattcccttttttgcggcattttgccttcctgtttttgctcacccagaaacgctggtgaaagtaaaagatgctgaagatcagttgggtgcacgagtgggttacatcgaactggatctcaacagcggtaagatccttgagagttttcgccccgaagaacgttttccaatgatgagcacttttaaagttctgctatgtggcgcggtattatcccgtattgacgccgggcaagagcaactcggtcgccgcatacactattctcagaatgacttggttgagtactcaccagtcacagaaaagcatcttacggatggcatgacagtaagagaattatgcagtgctgccataaccatgagtgataacactgcggccaacttacttctgacaacgatcggaggaccgaaggagctaaccgcttttttgcacaacatgggggatcatgtaactcgccttgatcgttgggaaccggagctgaatgaagccataccaaacgacgagcgtgacaccacgatgcctgtagcaatggcaacaacgttgcgcaaactattaactggcgaactacttactctagcttcccggcaacaattaatagactggatggaggcggataaagttgcaggaccacttctgcgctcggcccttccggctggctggtttattgctgataaatctggagccggtgagcgtgggtctcgcggtatcattgcagcactggggccagatggtaagccctcccgtatcgtagttatctacacgacggggagtcaggcaactatggatgaacgaaatagacagatcgctgagataggtgcctcactgattaagcattggtaactgtcagaccaagtttactcatatatactttagattgatttaaaacttcatttttaatttaaaaggatctaggtgaagatcctttttgataatctcatgaccaaaatcccttaacgtgagttttcgttccactgagcgtcagaccccgtagaaaagatcaaaggatcttcttgagatcctttttttctgcgcgtaatctgctgcttgcaaacaaaaaaaccaccgctaccagcggtggtttgtttgccggatcaagagctaccaactctttttccgaaggtaactggcttcagcagagcgcagataccaaatactgttcttctagtgtagccgtagttaggccaccacttcaagaactctgtagcaccgcctacatacctcgctctgctaatcctgttaccagtggctgctgccagtggcgataagtcgtgtcttaccgggttggactcaagacgatagttaccggataaggcgcagcggtcgggctgaacggggggttcgtgcacacagcccagcttggagcgaacgacctacaccgaactgagatacctacagcgtgagctatgagaaagcgccacgcttcccgaagggagaaaggcggacaggtatccggtaagcggcagggtcggaacaggagagcgcacgagggagcttccagggggaaacgcctggtatctttatagtcctgtcgggtttcgccacctctgacttgagcgtcgatttttgtgatgctcgtcaggggggcggagcctatggaaaaacgccagcaacgcggcctttttacggttcctggccttttgctggccttttgctcacatgttctttcctgcgttatcccctgattctgtggataaccgtattaccgcctttgagtgagctgataccgctcgccgcagccgaacgaccgagcgcagcgagtcagtgagcgaggaagcggaagagcgcccaatacgcaaaccgcctctccccgcgcgttggccgattcattaatgcagctggcacgacaggtttcccgactggaaagcgggcagtgagcgcaacgcaattaatgtgagttagctcactcattaggcaccccaggctttacactttatgcttccggctcgtatgttgtgtggaattgtgagcggataacaatttcacacaggaaacagctatgaccatgattacgccaagcgcgcaattaaccctcactaaagggaacaaaagctggagctgcaagctt

SEQ ID NO: 351 - DNA, 7566 bp, Artificial Sequence
  Synthetic Polynucleotide
tgaaagaccccacctgtaggtttggcaagctagcttaagtaacgccattttgcaaggcatggaaaatacataactgagaatagagaagttcagatcaaggttaggaacagagagacagcagaatatgggccaaacaggatatctgtggtaagcagttcctgccccggctcagggccaagaacagatggtccccagatgcggtcccgccctcagcagtttctagagaaccatcagatgtttccagggtgccccaaggacctgaaatgaccctgtgccttatttgaactaaccaatcagttcgcttctcgcttctgttcgcgcgcttctgctccccgagctcaataaaagagcccacaacccctcactcggcgcgccagtcctccgatagactgcgtcgcccgggtacccgtattcccaataaagcctcttgctgtttgcatccgaatcgtggactcgctgatccttgggagggtctcctcagattgattgactgcccacctcgggggtctttcatttggaggttccaccgagatttggagacccctgcccagggaccaccgacccccccgccgggaggtaagctggccagcggtcgtttcgtgtctgtctctgtctttgtgcgtgtttgtgccggcatctaatgtttgcgcctgcgtctgtactagttagctaactagctctgtatctggcggacccgtggtggaactgacgagttctgaacacccggccgcaaccctgggagacgtcccagggactttgggggccgtttttgtggcccgacctgaggaagggagtcgatgtggaatccgaccccgtcaggatatgtggttctggtaggagacgagaacctaaaacagttcccgcctccgtctgaatttttgctttcggtttggaaccgaagccgcgcgtcttgtctgctgcagcgctgcagcatcgttctgtgttgtctctgtctgactgtgtttctgtatttgtctgaaaattagggccagactgttaccactcccttaagtttgaccttaggtcactggaaagatgtcgagcggatcgctcacaaccagtcggtagatgtcaagaagagacgttgggttaccttctgctctgcagaatggccaacctttaacgtcggatggccgcgagacggcacctttaaccgagacctcatcacccaggttaagatcaaggtcttttcacctggcccgcatggacacccagaccaggtcccctacatcgtgacctgggaagccttggcttttgacccccctccctgggtcaagccctttgtacaccctaagcctccgcctcctcttcctccatccgccccgtctctcccccttgaacctcctcgttcgaccccgcctcgatcctccctttatccagccctcactccttctctaggcgccggaattagatccccaccatgaagcccaccgagaacaacgaagacttcaacatcgtggccgtggccagcaacttcgcgaccacggatctcgatgctgaccgcgggaagttgcccggcaagaagctgccgctggaggtgctcaaagagatggaagccaatgcccggaaagctggctgcaccaggggctgtctgatctgcctgtcccacatcaagtgcacgcccaagatgaagaagttcatcccaggacgctgccacacctacgaaggcgacaaagagtccgcacagggcggcataggcgaggcgatcgtcgacattcctgagattcctgggttcaaggacttggagcccatggagcagttcatcgcacaggtcgatctgtgtgtggactgcacaactggctgcctcaaagggcttgccaacgtgcagtgttctgacctgctcaagaagtggctgccgcaacgctgtgcgacctttgccagcaagatccagggccaggtggacaagatcaagggggccggtggtgacctcgagaccgatttctacccctacgatgtgcccgattacgcttagtctagagggccctattctatagtgtcacctaagtcgaggttaacgaattctaccgggtaggggaggcgcttttcccaaggcagtctggagcatgcgctttagcagccccgctgggcacttggcgctacacaagtggcctctggcctcgcacacattccacatccaccggtaggcgccaaccggctccgttctttggtggccccttcgcgccaccttctactcctcccctagtcaggaagttcccccccgccccgcagctcgcgtcgtgcaggacgtgacaaatggaagtagcacgtctcactagtctcgtgcagatggacagcaccgctgagcaatggaagcgggtaggcctttggggcagcggccaatagcagctttgctccttcgctttctgggctcagaggctgggaaggggtgggtccgggggcgggctcaggggcgggctcaggggcggggcgggcgcccgaaggtcctccggaggcccggcattctgcacgcttcaaaagcgcacgtctgccgcgctgttctcctcttcctcatctccgggcctttcgacctgcatcccgccaccatgaaaaagcctgaactcaccgcgacgtctgtcgagaagtttctgatcgaaaagttcgacagcgtctccgacctgatgcagctctcggagggcgaagaatctcgtgctttcagcttcgatgtaggagggcgtggatatgtcctgcgggtaaatagctgcgccgatggtttctacaaagatcgttatgtttatcggcactttgcatcggccgcgctcccgattccggaagtgcttgacattggggaattcagcgagagcctgacctattgcatctcccgccgtgcacagggtgtcacgttgcaagacctgcctgaaaccgaactgcccgctgttctgcagccggtcgcggaggccatggatgcgatcgctgcggccgatcttagccagacgagcgggttcggcccattcggaccgcaaggaatcggtcaatacactacatggcgtgatttcatatgcgcgattgctgatccccatgtgtatcactggcaaactgtgatggacgacaccgtcagtgcgtccgtcgcgcaggctctcgatgagctgatgctttgggccgaggactgccccgaagtccggcacctcgtgcacgcggatttcggctccaacaatgtcctgacggacaatggccgcataacagcggtcattgactggagcgaggcgatgttcggggattcccaatacgaggtcgccaacatcttcttctggaggccgtggttggcttgtatggagcagcagacgcgctacttcgagcggaggcatccggagcttgcaggatcgccgcggctccggggcgtatatgctccgcattggtcttgaccaactctatcagagcttggttgacggcaatttcgatgatgcagcttgggcgcagggtcgatgcgacgcaatcgtccgatccggagccgggactgtcgggcgtacacaaatcgcccgcagaagcgcggccgtctggaccgatggctgtgtagaagtactcgccgatagtggaaaccgacgccccagcactcgtccgagggcaaaggaatagagtagatgccgaccgaacaagagctgatttcgagaacgcctcagccagcaactcgcgcgagcctagcaaggcaaatgcgagagaacggccttacgcttggtggcacagttctcgtccacagttcgctaagctcgctcggctgggtcgcgggagggccggtcgcagtgattcaggcccttctggattgtgttggtccccagggcacgattgtcatgcccacgcactcgggtgatctgactgatcccgcagattggagatcgccgcccgtgcctgccgattgggtgcagatccgtcgacctgcagccaagcttatcgataaaataaaagattttatttagtctccagaaaaaggggggaatgaaagaccccacctgtaggtttggcaagctagcttaagtaacgccattttgcaaggcatggaaaatacataactgagaatagagaagttcagatcaaggttaggaacagagagacagcagaatatgggccaaacaggatatctgtggtaagcagttcctgccccggctcagggccaagaacagatggtccccagatgcggtcccgccctcagcagtttctagagaaccatcagatgtttccagggtgccccaaggacctgaaatgaccctgtgccttatttgaactaaccaatcagttcgcttctcgcttctgttcgcgcgcttctgctccccgagctcaataaaagagcccacaacccctcactcggcgcgccagtcctccgatagactgcgtcgcccgggtacccgtgtatccaataaaccctcttgcagttgcatccgacttgtggtctcgctgttccttgggagggtctcctctgagtgattgactacccgtcagcgggggtctttcatgggtaacagtttcttgaagttggagaacaacattctgagggtaggagtcgaatattaagtaatcctgactcaattagccactgttttgaatccacatactccaatactcctgaaatagttcattatggacagcgcagaagagctggggagaattaattcgtaatcatggtcatagctgtttcctgtgtgaaattgttatccgctcacaattccacacaacatacgagccggaagcataaagtgtaaagcctggggtgcctaatgagtgagctaactcacattaattgcgttgcgctcactgcccgctttccagtcgggaaacctgtcgtgccagctgcattaatgaatcggccaacgcgcggggagaggcggtttgcgtattgggcgctcttccgcttcctcgctcactgactcgctgcgctcggtcgttcggctgcggcgagcggtatcagctcactcaaaggcggtaatacggttatccacagaatcaggggataacgcaggaaagaacatgtgagcaaaaggccagcaaaaggccaggaaccgtaaaaaggccgcgttgctggcgtttttccataggctccgcccccctgacgagcatcacaaaaatcgacgctcaagtcagaggtggcgaaacccgacaggactataaagataccaggcgtttccccctggaagctccctcgtgcgctctcctgttccgaccctgccgcttaccggatacctgtccgcctttctcccttcgggaagcgtggcgctttctcatagctcacgctgtaggtatctcagttcggtgtaggtcgttcgctccaagctgggctgtgtgcacgaaccccccgttcagcccgaccgctgcgccttatccggtaactatcgtcttgagtccaacccggtaagacacgacttatcgccactggcagcagccactggtaacaggattagcagagcgaggtatgtaggcggtgctacagagttcttgaagtggtggcctaactacggctacactagaaggacagtatttggtatctgcgctctgctgaagccagttaccttcggaaaaagagttggtagctcttgatccggcaaacaaaccaccgctggtagcggtggtttttttgtttgcaagcagcagattacgcgcagaaaaaaaggatctcaagaagatcctttgatcttttctacggggtctgacgctcagtggaacgaaaactcacgttaagggattttggtcatgagattatcaaaaaggatcttcacctagatccttttaaattaaaaatgaagttttaaatcaatctaaagtatatatgagtaaacttggtctgacagttaccaatgcttaatcagtgaggcacctatctcagcgatctgtctatttcgttcatccatagttgcctgactccccgtcgtgtagataactacgatacgggagggcttaccatctggccccagtgctgcaatgataccgcgagacccacgctcaccggctccagatttatcagcaataaaccagccagccggaagggccgagcgcagaagtggtcctgcaactttatccgcctccatccagtctattaattgttgccgggaagctagagtaagtagttcgccagttaatagtttgcgcaacgttgttgccattgctacaggcatcgtggtgtcacgctcgtcgtttggtatggcttcattcagctccggttcccaacgatcaaggcgagttacatgatcccccatgttgtgcaaaaaagcggttagctccttcggtcctccgatcgttgtcagaagtaagttggccgcagtgttatcactcatggttatggcagcactgcataattctcttactgtcatgccatccgtaagatgcttttctgtgactggtgagtactcaaccaagtcattctgagaatagtgtatgcggcgaccgagttgctcttgcccggcgtcaatacgggataataccgcgccacatagcagaactttaaaagtgctcatcattggaaaacgttcttcggggcgaaaactctcaaggatcttaccgctgttgagatccagttcgatgtaacccactcgtgcacccaactgatcttcagcatcttttactttcaccagcgtttctgggtgagcaaaaacaggaaggcaaaatgccgcaaaaaagggaataagggcgacacggaaatgttgaatactcatactcttcctttttcaatattattgaagcatttatcagggttattgtctcatgagcggatacatatttgaatgtatttagaaaaataaacaaataggggttccgcgcacatttccccgaaaagtgccacctgacgtctaagaaaccattattatcatgacattaacctataaaaataggcgtatcacgaggccctttcgtctcgcgcgtttcggtgatgacggtgaaaacctctgacacatgcagctcccggagacggtcacagcttgtctgtaagcggatgccgggagcagacaagcccgtcagggcgcgtcagcgggtgttggcgggtgtcggggctggcttaactatgcggcatcagagcagattgtactgagagtgcaccatatgcggtgtgaaataccgcacagatgcgtaaggagaaaataccgcatcaggcgccattcgccattcaggctgcgcaactgttgggaagggcgatcggtgcgggcctcttcgctattacgccagctggcgaaagggggatgtgctgcaaggcgattaagttgggtaacgccagggttttcccagtcacgacgttgtaaaacgacggcgcaaggaatggtgcatgcaaggagatggcgcccaacagtcccccggccacggggcctgccaccatacccacgccgaaacaagcgctcatgagcccgaagtggcgagcccgatcttccccatcggtgatgtcggcgatataggcgccagcaaccgcacctgtggcgccggtgatgccggccacgatgcgtccggcgtagaggcgattagtccaatttgttaaagacaggatatcagtggtccaggctctagttttgactcaacaatatcaccagctgaagcctatagagtacgagccatagataaaataaaagattttatttagtctccagaaaaaggggggaa

SEQ ID NO: 352 - DNA, 7512 bp, Artificial Sequence
  Synthetic Polynucleotide
aatgtagtcttatgcaatactcttgtagtcttgcaacatggtaacgatgagttagcaacatgccttacaaggagagaaaaagcaccgtgcatgccgattggtggaagtaaggtggtacgatcgtgccttattaggaaggcaacagacgggtctgacatggattggacgaaccactgaattgccgcattgcagagatattgtatttaagtgcctagctcgatacataaacgggtctctctggttagaccagatctgagcctgggagctctctggctaactagggaacccactgcttaagcctcaataaagcttgccttgagtgcttcaagtagtgtgtgcccgtctgttgtgtgactctggtaactagagatccctcagacccttttagtcagtgtggaaaatctctagcagtggcgcccgaacagggacttgaaagcgaaagggaaaccagaggagctctctcgacgcaggactcggcttgctgaagcgcgcacggcaagaggcgaggggcggcgactggtgagtacgccaaaaattttgactagcggaggctagaaggagagagatgggtgcgagagcgtcagtattaagcgggggagaattagatcgcgatgggaaaaaattcggttaaggccagggggaaagaaaaaatataaattaaaacatatagtatgggcaagcagggagctagaacgattcgcagttaatcctggcctgttagaaacatcagaaggctgtagacaaatactgggacagctacaaccatcccttcagacaggatcagaagaacttagatcattatataatacagtagcaaccctctattgtgtgcatcaaaggatagagataaaagacaccaaggaagctttagacaagatagaggaagagcaaaacaaaagtaagaccaccgcacagcaagcggccgctgatcttcagacctggaggaggagatatgagggacaattggagaagtgaattatataaatataaagtagtaaaaattgaaccattaggagtagcacccaccaaggcaaagagaagagtggtgcagagagaaaaaagagcagtgggaataggagctttgttccttgggttcttgggagcagcaggaagcactatgggcgcagcgtcaatgacgctgacggtacaggccagacaattattgtctggtatagtgcagcagcagaacaatttgctgagggctattgaggcgcaacagcatctgttgcaactcacagtctggggcatcaagcagctccaggcaagaatcctggctgtggaaagatacctaaaggatcaacagctcctggggatttggggttgctctggaaaactcatttgcaccactgctgtgccttggaatgctagttggagtaataaatctctggaacagatttggaatcacacgacctggatggagtgggacagagaaattaacaattacacaagcttaatacactccttaattgaagaatcgcaaaaccagcaagaaaagaatgaacaagaattattggaattagataaatgggcaagtttgtggaattggtttaacataacaaattggctgtggtatataaaattattcataatgatagtaggaggcttggtaggtttaagaatagtttttgctgtactttctatagtgaatagagttaggcagggatattcaccattatcgtttcagacccacctcccaaccccgaggggacccgacaggcccgaaggaatagaagaagaaggtggagagagagacagagacagatccattcgattagtgaacggatctcgacggtatcgataagcttgggagttccgcgttacataacttacggtaaatggcccgcctggctgaccgcccaacgacccccgcccattgacgtcaataatgacgtatgttcccatagtaacgccaatagggactttccattgacgtcaatgggtggagtatttacggtaaactgcccacttggcagtacatcaagtgtatcatatgccaagtacgccccctattgacgtcaatgacggtaaatggcccgcctggcattatgcccagtacatgaccttatgggactttcctacttggcagtacatctacgtattagtcatcgctattaccatggtgatgcggttttggcagtacatcaatgggcgtggatagcggtttgactcacggggatttccaagtctccaccccattgacgtcaatgggagtttgttttggcaccaaaatcaacgggactttccaaaatgtcgtaacaactccgccccattgacgcaaatgggcggtaggcgtgtacggtgggaggtctatataagcagagctcgtttagtgaaccgtcagatcgcctggagacgccatccacgctgttttgacctccatagaagacaccgactctagaggatccccaccatggtcttcacactcgaagatttcgttggggactggcgacagacagccggctacaacctggaccaagtccttgaacagggaggtgtgtccagtttgtttcagaatctcggggtgtccgtaactccgatccaaaggattgtcctgagcggtgaaaatgggctgaagatcgacatccatgtcatcatcccgtatgaaggtctgagcggcgaccaaatgggccagatcgaaaaaatttttaaggtggtgtaccctgtggatgatcatcactttaaggtgatcctgcactatggcacactggtaatcgacggggttacgccgaacatgatcgactatttcggacggccctatgaaggcatcgccgtgttcgacggcaaaaagatcactgtaacagggaccctgtggaacggcaacaaaattatcgacgagcgcctgatcaaccccgacggctccctgctgttccgagtaaccatcaacggagtgaccggctggcggctgtgcgaacgcattctggcgagttggaaggatgcctctggatggtcttaagtcgagaccgatttctacccctacgatgtgcccgattacgcttagtctagagggcccgcggttcgaaggtaagcctatccctaaccctctcctcggtctcgattctacgcgtaccggttagtaatgagtttggaattaattctgtggaatgtgtgtcagttagggtgtggaaagtccccaggctccccaggcaggcagaagtatgcaaagcatgcatctcaattagtcagcaaccaggtgtggaaagtccccaggctccccagcaggcagaagtatgcaaagcatgcatctcaattagtcagcaaccatagtcccgcccctaactccgcccatcccgcccctaactccgcccagttccgcccattctccgccccatggctgactaattttttttatttatgcagaggccgaggccgcctctgcctctgagctattccagaagtagtgaggaggcttttttggaggcctaggcttttgcaaaaagctcccgggagcttgtatatccattttcggatctgatcagcacgtgttgacaattaatcatcggcatagtatatcggcatagtataatacgacaaggtgaggaactaaaccatggccaagcctttgtctcaagaagaatccaccctcattgaaagagcaacggctacaatcaacagcatccccatctctgaagactacagcgtcgccagcgcagctctctctagcgacggccgcatcttcactggtgtcaatgtatatcattttactgggggaccttgtgcagaactcgtggtgctgggcactgctgctgctgcggcagctggcaacctgacttgtatcgtcgcgatcggaaatgagaacaggggcatcttgagcccctgcggacggtgccgacaggtgcttctcgatctgcatcctgggatcaaagccatagtgaaggacagtgatggacagccgacggcagttgggattcgtgaattgctgccctctggttatgtgtgggagggctaagcacaattcgagctcggtacctttaagaccaatgacttacaaggcagctgtagatcttagccactttttaaaagaaaaggggggactggaagggctaattcactcccaacgaagacaagatctgctttttgcttgtactgggtctctctggttagaccagatctgagcctgggagctctctggctaactagggaacccactgcttaagcctcaataaagcttgccttgagtgcttcaagtagtgtgtgcccgtctgttgtgtgactctggtaactagagatccctcagacccttttagtcagtgtggaaaatctctagcagtagtagttcatgtcatcttattattcagtatttataacttgcaaagaaatgaatatcagagagtgagaggaacttgtttattgcagcttataatggttacaaataaagcaatagcatcacaaatttcacaaataaagcatttttttcactgcattctagttgtggtttgtccaaactcatcaatgtatcttatcatgtctggctctagctatcccgcccctaactccgcccatcccgcccctaactccgcccagttccgcccattctccgccccatggctgactaattttttttatttatgcagaggccgaggccgcctcggcctctgagctattccagaagtagtgaggaggcttttttggaggcctagggacgtacccaattcgccctatagtgagtcgtattacgcgcgctcactggccgtcgttttacaacgtcgtgactgggaaaaccctggcgttacccaacttaatcgccttgcagcacatccccctttcgccagctggcgtaatagcgaagaggcccgcaccgatcgcccttcccaacagttgcgcagcctgaatggcgaatgggacgcgccctgtagcggcgcattaagcgcggcgggtgtggtggttacgcgcagcgtgaccgctacacttgccagcgccctagcgcccgctcctttcgctttcttcccttcctttctcgccacgttcgccggctttccccgtcaagctctaaatcgggggctccctttagggttccgatttagtgctttacggcacctcgaccccaaaaaacttgattagggtgatggttcacgtagtgggccatcgccctgatagacggtttttcgccctttgacgttggagtccacgttctttaatagtggactcttgttccaaactggaacaacactcaaccctatctcggtctattcttttgatttataagggattttgccgatttcggcctattggttaaaaaatgagctgatttaacaaaaatttaacgcgaattttaacaaaatattaacgcttacaatttaggtggcacttttcggggaaatgtgcgcggaacccctatttgtttatttttctaaatacattcaaatatgtatccgctcatgagacaataaccctgataaatgcttcaataatattgaaaaaggaagagtatgagtattcaacatttccgtgtcgcccttattcccttttttgcggcattttgccttcctgtttttgctcacccagaaacgctggtgaaagtaaaagatgctgaagatcagttgggtgcacgagtgggttacatcgaactggatctcaacagcggtaagatccttgagagttttcgccccgaagaacgttttccaatgatgagcacttttaaagttctgctatgtggcgcggtattatcccgtattgacgccgggcaagagcaactcggtcgccgcatacactattctcagaatgacttggttgagtactcaccagtcacagaaaagcatcttacggatggcatgacagtaagagaattatgcagtgctgccataaccatgagtgataacactgcggccaacttacttctgacaacgatcggaggaccgaaggagctaaccgcttttttgcacaacatgggggatcatgtaactcgccttgatcgttgggaaccggagctgaatgaagccataccaaacgacgagcgtgacaccacgatgcctgtagcaatggcaacaacgttgcgcaaactattaactggcgaactacttactctagcttcccggcaacaattaatagactggatggaggcggataaagttgcaggaccacttctgcgctcggcccttccggctggctggtttattgctgataaatctggagccggtgagcgtgggtctcgcggtatcattgcagcactggggccagatggtaagccctcccgtatcgtagttatctacacgacggggagtcaggcaactatggatgaacgaaatagacagatcgctgagataggtgcctcactgattaagcattggtaactgtcagaccaagtttactcatatatactttagattgatttaaaacttcatttttaatttaaaaggatctaggtgaagatcctttttgataatctcatgaccaaaatcccttaacgtgagttttcgttccactgagcgtcagaccccgtagaaaagatcaaaggatcttcttgagatcctttttttctgcgcgtaatctgctgcttgcaaacaaaaaaaccaccgctaccagcggtggtttgtttgccggatcaagagctaccaactctttttccgaaggtaactggcttcagcagagcgcagataccaaatactgttcttctagtgtagccgtagttaggccaccacttcaagaactctgtagcaccgcctacatacctcgctctgctaatcctgttaccagtggctgctgccagtggcgataagtcgtgtcttaccgggttggactcaagacgatagttaccggataaggcgcagcggtcgggctgaacggggggttcgtgcacacagcccagcttggagcgaacgacctacaccgaactgagatacctacagcgtgagctatgagaaagcgccacgcttcccgaagggagaaaggcggacaggtatccggtaagcggcagggtcggaacaggagagcgcacgagggagcttccagggggaaacgcctggtatctttatagtcctgtcgggtttcgccacctctgacttgagcgtcgatttttgtgatgctcgtcaggggggcggagcctatggaaaaacgccagcaacgcggcctttttacggttcctggccttttgctggccttttgctcacatgttctttcctgcgttatcccctgattctgtggataaccgtattaccgcctttgagtgagctgataccgctcgccgcagccgaacgaccgagcgcagcgagtcagtgagcgaggaagcggaagagcgcccaatacgcaaaccgcctctccccgcgcgttggccgattcattaatgcagctggcacgacaggtttcccgactggaaagcgggcagtgagcgcaacgcaattaatgtgagttagctcactcattaggcaccccaggctttacactttatgcttccggctcgtatgttgtgtggaattgtgagcggataacaatttcacacaggaaacagctatgaccatgattacgccaagcgcgcaattaaccctcactaaagggaacaaaagctggagctgcaagctt

SEQ ID NO: 353 - DNA, 223 bp, Artificial Sequence
  Synthetic Polynucleotide
gaacgctgacgtcatcaacccgctccaaggaatcgcgggcccagtgtcactaggcgggaacacccagcgcgcgtgcgccctggcaggaagatggctgtgagggacaggggagtggcgccctgcaatatttgcatgtcgctatgtgttctgggaaatcaccataaacgtgaaatgtctttggatttgggaatcttataagttctgtatgagaccactctttccc

SEQ ID NO: 354 - DNA, 277 bp, Artificial Sequence
  Synthetic Polynucleotide
gaacgctgacgtcatcaacccgctccaaggaatcgcgggcccagtgtcactaggcgggaacacccagcgcgcgtgcgccctggcaggaagatggctgtgagggacaggggagtggcgccctgcaatatttgcatgtcgctatgtgttctgggaaatcaccataaacgtgaaatgtctttggatttgggaatcttataagttctgtatgagaccactctttcccgagagcacacctattcagcaactcgagttgctgaataggtgtgctctctttttt

SEQ ID NO: 355 - DNA, 7157 bp, Artificial Sequence
  Synthetic Polynucleotide
  misc_feature (3291)..(3294): n is a, c, g, or t
aatgtagtcttatgcaatactcttgtagtcttgcaacatggtaacgatgagttagcaacatgccttacaaggagagaaaaagcaccgtgcatgccgattggtggaagtaaggtggtacgatcgtgccttattaggaaggcaacagacgggtctgacatggattggacgaaccactgaattgccgcattgcagagatattgtatttaagtgcctagctcgatacataaacgggtctctctggttagaccagatctgagcctgggagctctctggctaactagggaacccactgcttaagcctcaataaagcttgccttgagtgcttcaagtagtgtgtgcccgtctgttgtgtgactctggtaactagagatccctcagacccttttagtcagtgtggaaaatctctagcagtggcgcccgaacagggacttgaaagcgaaagggaaaccagaggagctctctcgacgcaggactcggcttgctgaagcgcgcacggcaagaggcgaggggcggcgactggtgagtacgccaaaaattttgactagcggaggctagaaggagagagatgggtgcgagagcgtcagtattaagcgggggagaattagatcgcgatgggaaaaaattcggttaaggccagggggaaagaaaaaatataaattaaaacatatagtatgggcaagcagggagctagaacgattcgcagttaatcctggcctgttagaaacatcagaaggctgtagacaaatactgggacagctacaaccatcccttcagacaggatcagaagaacttagatcattatataatacagtagcaaccctctattgtgtgcatcaaaggatagagataaaagacaccaaggaagctttagacaagatagaggaagagcaaaacaaaagtaagaccaccgcacagcaagcggccgctgatcttcagacctggaggaggagatatgagggacaattggagaagtgaattatataaatataaagtagtaaaaattgaaccattaggagtagcacccaccaaggcaaagagaagagtggtgcagagagaaaaaagagcagtgggaataggagctttgttccttgggttcttgggagcagcaggaagcactatgggcgcagcgtcaatgacgctgacggtacaggccagacaattattgtctggtatagtgcagcagcagaacaatttgctgagggctattgaggcgcaacagcatctgttgcaactcacagtctggggcatcaagcagctccaggcaagaatcctggctgtggaaagatacctaaaggatcaacagctcctggggatttggggttgctctggaaaactcatttgcaccactgctgtgccttggaatgctagttggagtaataaatctctggaacagatttggaatcacacgacctggatggagtgggacagagaaattaacaattacacaagcttaatacactccttaattgaagaatcgcaaaaccagcaagaaaagaatgaacaagaattattggaattagataaatgggcaagtttgtggaattggtttaacataacaaattggctgtggtatataaaattattcataatgatagtaggaggcttggtaggtttaagaatagtttttgctgtactttctatagtgaatagagttaggcagggatattcaccattatcgtttcagacccacctcccaaccccgaggggacccgacaggcccgaaggaatagaagaagaaggtggagagagagacagagacagatccattcgattagtgaacggatctcgacggtatcggttaacttttaaaagaaaaggggggattggggggtacagtgcaggggaaagaatagtagacataatagcaacagacatacaaactaaagaattacaaaaacaaattacaaaattcaaaattttatcgataagctttgcaaagatggataaagttttaaacagagaggaatctttgcagctaatggaccttctaggtcttgaaaggagtgcctcgtgaggctccggtgcccgtcagtgggcagagcgcacatcgcccacagtccccgagaagttggggggaggggtcggcaattgaaccggtgcctagagaaggtggcgcggggtaaactgggaaagtgatgtcgtgtactggctccgcctttttcccgagggtgggggagaaccgtatataagtgcagtagtcgccgtgaacgttctttttcgcaacgggtttgccgccagaacacaggtaagtgccgtgtgtggttcccgcgggcctggcctctttacgggttatggcccttgcgtgccttgaattacttccacctggctgcagtacgtgattcttgatcccgagcttcgggttggaagtgggtgggagagttcgaggccttgcgcttaaggagccccttcgcctcgtgcttgagttgaggcctggcctgggcgctggggccgccgcgtgcgaatctggtggcaccttcgcgcctgtctcgctgctttcgataagtctctagccatttaaaatttttgatgacctgctgcgacgctttttttctggcaagatagtcttgtaaatgcgggccaagatctgcacactggtatttcggtttttggggccgcgggcggcgacggggcccgtgcgtcccagcgcacatgttcggcgaggcggggcctgcgagcgcggccaccgagaatcggacgggggtagtctcaagctggccggcctgctctggtgcctggcctcgcgccgccgtgtatcgccccgccctgggcggcaaggctggcccggtcggcaccagttgcgtgagcggaaagatggccgcttcccggccctgctgcagggagctcaaaatggaggacgcggcgctcgggagagcgggcgggtgagtcacccacacaaaggaaaagggcctttccgtcctcagccgtcgcttcatgtgactccacggagtaccgggcgccgtccaggcacctcgattagttctcgaccttttggagtacgtcgtctttaggttggggggaggggttttatgcgatggagtttccccacactgagtgggtggagactgaagttaggccagcttggcacttgatgtaattctccttggaatttgccctttttgagtttggatcttggttcattctcaagcctcagacagtggttcaaagtttttttcttccatttcaggtgtcgtgaggaattagcttggtactaatacgactcactatagggagacccaagctggctaggtaagcttgatatcgaattcctgcagcccgggggatctgctagcnnnngtcgacgaacgctgacgtcatcaacccgctccaaggaatcgcgggcccagtgtcactaggcgggaacacccagcgcgcgtgcgccctggcaggaagatggctgtgagggacaggggagtggcgccctgcaatatttgcatgtcgctatgtgttctgggaaatcaccataaacgtgaaatgtctttggatttgggaatcttataagttctgtatgagaccactctttcccgagagcacacctattcagcaactcgagttgctgaataggtgtgctctcttttttccggactatagtgtcacctaaatgctagacgtacctttaagaccaatgacttacaaggcagctgtagatcttagccactttttaaaagaaaaggggggactggaagggctaattcactcccaacgaagacaagatctgctttttgcttgtactgggtctctctggttagaccagatctgagcctgggagctctctggctaactagggaacccactgcttaagcctcaataaagcttgccttgagtgcttcaagtagtgtgtgcccgtctgttgtgtgactctggtaactagagatccctcagacccttttagtcagtgtggaaaatctctagcagtagtagttcatgtcatcttattattcagtatttataacttgcaaagaaatgaatatcagagagtgagaggaacttgtttattgcagcttataatggttacaaataaagcaatagcatcacaaatttcacaaataaagcatttttttcactgcattctagttgtggtttgtccaaactcatcaatgtatcttatcatgtctggctctagctatcccgcccctaactccgcccatcccgcccctaactccgcccagttccgcccattctccgccccatggctgactaattttttttatttatgcagaggccgaggccgcctcggcctctgagctattccagaagtagtgaggaggcttttttggaggcctagggacgtacccaattcgccctatagtgagtcgtattacgcgcgctcactggccgtcgttttacaacgtcgtgactgggaaaaccctggcgttacccaacttaatcgccttgcagcacatccccctttcgccagctggcgtaatagcgaagaggcccgcaccgatcgcccttcccaacagttgcgcagcctgaatggcgaatgggacgcgccctgtagcggcgcattaagcgcggcgggtgtggtggttacgcgcagcgtgaccgctacacttgccagcgccctagcgcccgctcctttcgctttcttcccttcctttctcgccacgttcgccggctttccccgtcaagctctaaatcgggggctccctttagggttccgatttagtgctttacggcacctcgaccccaaaaaacttgattagggtgatggttcacgtagtgggccatcgccctgatagacggtttttcgccctttgacgttggagtccacgttctttaatagtggactcttgttccaaactggaacaacactcaaccctatctcggtctattcttttgatttataagggattttgccgatttcggcctattggttaaaaaatgagctgatttaacaaaaatttaacgcgaattttaacaaaatattaacgcttacaatttaggtggcacttttcggggaaatgtgcgcggaacccctatttgtttatttttctaaatacattcaaatatgtatccgctcatgagacaataaccctgataaatgcttcaataatattgaaaaaggaagagtatgagtattcaacatttccgtgtcgcccttattcccttttttgcggcattttgccttcctgtttttgctcacccagaaacgctggtgaaagtaaaagatgctgaagatcagttgggtgcacgagtgggttacatcgaactggatctcaacagcggtaagatccttgagagttttcgccccgaagaacgttttccaatgatgagcacttttaaagttctgctatgtggcgcggtattatcccgtattgacgccgggcaagagcaactcggtcgccgcatacactattctcagaatgacttggttgagtactcaccagtcacagaaaagcatcttacggatggcatgacagtaagagaattatgcagtgctgccataaccatgagtgataacactgcggccaacttacttctgacaacgatcggaggaccgaaggagctaaccgcttttttgcacaacatgggggatcatgtaactcgccttgatcgttgggaaccggagctgaatgaagccataccaaacgacgagcgtgacaccacgatgcctgtagcaatggcaacaacgttgcgcaaactattaactggcgaactacttactctagcttcccggcaacaattaatagactggatggaggcggataaagttgcaggaccacttctgcgctcggcccttccggctggctggtttattgctgataaatctggagccggtgagcgtgggtctcgcggtatcattgcagcactggggccagatggtaagccctcccgtatcgtagttatctacacgacggggagtcaggcaactatggatgaacgaaatagacagatcgctgagataggtgcctcactgattaagcattggtaactgtcagaccaagtttactcatatatactttagattgatttaaaacttcatttttaatttaaaaggatctaggtgaagatcctttttgataatctcatgaccaaaatcccttaacgtgagttttcgttccactgagcgtcagaccccgtagaaaagatcaaaggatcttcttgagatcctttttttctgcgcgtaatctgctgcttgcaaacaaaaaaaccaccgctaccagcggtggtttgtttgccggatcaagagctaccaactctttttccgaaggtaactggcttcagcagagcgcagataccaaatactgttcttctagtgtagccgtagttaggccaccacttcaagaactctgtagcaccgcctacatacctcgctctgctaatcctgttaccagtggctgctgccagtggcgataagtcgtgtcttaccgggttggactcaagacgatagttaccggataaggcgcagcggtcgggctgaacggggggttcgtgcacacagcccagcttggagcgaacgacctacaccgaactgagatacctacagcgtgagctatgagaaagcgccacgcttcccgaagggagaaaggcggacaggtatccggtaagcggcagggtcggaacaggagagcgcacgagggagcttccagggggaaacgcctggtatctttatagtcctgtcgggtttcgccacctctgacttgagcgtcgatttttgtgatgctcgtcaggggggcggagcctatggaaaaacgccagcaacgcggcctttttacggttcctggccttttgctggccttttgctcacatgttctttcctgcgttatcccctgattctgtggataaccgtattaccgcctttgagtgagctgataccgctcgccgcagccgaacgaccgagcgcagcgagtcagtgagcgaggaagcggaagagcgcccaatacgcaaaccgcctctccccgcgcgttggccgattcattaatgcagctggcacgacaggtttcccgactggaaagcgggcagtgagcgcaacgcaattaatgtgagttagctcactcattaggcaccccaggctttacactttatgcttccggctcgtatgttgtgtggaattgtgagcggataacaatttcacacaggaaacagctatgaccatgattacgccaagcgcgcaattaaccctcactaaagggaacaaaagctggagctgcaagctt

SEQ ID NO: 356 - DNA, 9802 bp, Artificial Sequence
  Synthetic Polynucleotide
aatgtagtcttatgcaatactcttgtagtcttgcaacatggtaacgatgagttagcaacatgccttacaaggagagaaaaagcaccgtgcatgccgattggtggaagtaaggtggtacgatcgtgccttattaggaaggcaacagacgggtctgacatggattggacgaaccactgaattgccgcattgcagagatattgtatttaagtgcctagctcgatacataaacgggtctctctggttagaccagatctgagcctgggagctctctggctaactagggaacccactgcttaagcctcaataaagcttgccttgagtgcttcaagtagtgtgtgcccgtctgttgtgtgactctggtaactagagatccctcagacccttttagtcagtgtggaaaatctctagcagtggcgcccgaacagggacttgaaagcgaaagggaaaccagaggagctctctcgacgcaggactcggcttgctgaagcgcgcacggcaagaggcgaggggcggcgactggtgagtacgccaaaaattttgactagcggaggctagaaggagagagatgggtgcgagagcgtcagtattaagcgggggagaattagatcgcgatgggaaaaaattcggttaaggccagggggaaagaaaaaatataaattaaaacatatagtatgggcaagcagggagctagaacgattcgcagttaatcctggcctgttagaaacatcagaaggctgtagacaaatactgggacagctacaaccatcccttcagacaggatcagaagaacttagatcattatataatacagtagcaaccctctattgtgtgcatcaaaggatagagataaaagacaccaaggaagctttagacaagatagaggaagagcaaaacaaaagtaagaccaccgcacagcaagcggccgctgatcttcagacctggaggaggagatatgagggacaattggagaagtgaattatataaatataaagtagtaaaaattgaaccattaggagtagcacccaccaaggcaaagagaagagtggtgcagagagaaaaaagagcagtgggaataggagctttgttccttgggttcttgggagcagcaggaagcactatgggcgcagcgtcaatgacgctgacggtacaggccagacaattattgtctggtatagtgcagcagcagaacaatttgctgagggctattgaggcgcaacagcatctgttgcaactcacagtctggggcatcaagcagctccaggcaagaatcctggctgtggaaagatacctaaaggatcaacagctcctggggatttggggttgctctggaaaactcatttgcaccactgctgtgccttggaatgctagttggagtaataaatctctggaacagatttggaatcacacgacctggatggagtgggacagagaaattaacaattacacaagcttaatacactccttaattgaagaatcgcaaaaccagcaagaaaagaatgaacaagaattattggaattagataaatgggcaagtttgtggaattggtttaacataacaaattggctgtggtatataaaattattcataatgatagtaggaggcttggtaggtttaagaatagtttttgctgtactttctatagtgaatagagttaggcagggatattcaccattatcgtttcagacccacctcccaaccccgaggggacccgacaggcccgaaggaatagaagaagaaggtggagagagagacagagacagatccattcgattagtgaacggatctcgacggtatcggttaacttttaaaagaaaaggggggattggggggtacagtgcaggggaaagaatagtagacataatagcaacagacatacaaactaaagaattacaaaaacaaattacaaaattcaaaattttatcgataagctttgcaaagatggataaagttttaaacagagaggaatctttgcagctaatggaccttctaggtcttgaaaggagtgcctcgtgaggctccggtgcccgtcagtgggcagagcgcacatcgcccacagtccccgagaagttggggggaggggtcggcaattgaaccggtgcctagagaaggtggcgcggggtaaactgggaaagtgatgtcgtgtactggctccgcctttttcccgagggtgggggagaaccgtatataagtgcagtagtcgccgtgaacgttctttttcgcaacgggtttgccgccagaacacaggtaagtgccgtgtgtggttcccgcgggcctggcctctttacgggttatggcccttgcgtgccttgaattacttccacctggctgcagtacgtgattcttgatcccgagcttcgggttggaagtgggtgggagagttcgaggccttgcgcttaaggagccccttcgcctcgtgcttgagttgaggcctggcctgggcgctggggccgccgcgtgcgaatctggtggcaccttcgcgcctgtctcgctgctttcgataagtctctagccatttaaaatttttgatgacctgctgcgacgctttttttctggcaagatagtcttgtaaatgcgggccaagatctgcacactggtatttcggtttttggggccgcgggcggcgacggggcccgtgcgtcccagcgcacatgttcggcgaggcggggcctgcgagcgcggccaccgagaatcggacgggggtagtctcaagctggccggcctgctctggtgcctggcctcgcgccgccgtgtatcgccccgccctgggcggcaaggctggcccggtcggcaccagttgcgtgagcggaaagatggccgcttcccggccctgctgcagggagctcaaaatggaggacgcggcgctcgggagagcgggcgggtgagtcacccacacaaaggaaaagggcctttccgtcctcagccgtcgcttcatgtgactccacggagtaccgggcgccgtccaggcacctcgattagttctcgaccttttggagtacgtcgtctttaggttggggggaggggttttatgcgatggagtttccccacactgagtgggtggagactgaagttaggccagcttggcacttgatgtaattctccttggaatttgccctttttgagtttggatcttggttcattctcaagcctcagacagtggttcaaagtttttttcttccatttcaggtgtcgtgaggaattagcttggtactaatacgactcactatagggagacccaagctggctaggtaagcttgatatcgaattcctgcagcccgggggatctgctagcatggccttaccagtgaccgccttgctcctgccgctggccttgctgctccacgccgccaggccggacatccagatgacacagactacatcctccctgtctgcctctctgggagacagagtcaccatcagttgcagggcaagtcaggacattagtaagtacctgaactggtatcagcagaaaccagatggaactgttaaactcctgatctaccatacatcaagattacactcaggagtcccatcaaggttcagtggcagtgggtctggaacagattattctctcaccattagcaacctggagcaagaagatattgccacttacttttgccaacagggtaatacgcttccgtacacgttcggaggggggaccaagctggagatcacactcgaggggaaaccaattcccaaccctcttctgggactggattcaaccggcagcggcgaggacctgaagaacgtgttcccacctgaggtggccgtgttcgagcctagcaaggccgagatcgcccacacccagaaagccaccctcgtgtgcctggctaccggcttctaccccgaccatgtggaactgtcttggtgggtcaacggcaaagaggtgcacagcggcgtgtgtaccgacccccagccactgaaagaacagcccgccctgaacgacagccggtactgcctgagcagcagactgagagtgtccgccaccttctggcagaacccccggaaccacttcagatgccaggtgcagttctacggcctgagcgagaacgacgagtggacccaggacagagccaagcccgtgacccagatcgtgtctgccgaagcctggggcagagccgattgcggcatcaccagcgccagctaccaccagggcgtgctgagcgccaccatcctgtacgagatcctgctgggcaaggccaccctgtacgccgtgctggtgtctgccctggtgctgatggctatggtcaagcggaaggacagccggggaagggccaagcgatctggatctggagcaacaaacttctcactactcaaacaagcaggtgacgtggaggagaatcccgggcctactagtatggactggatttggcgcatccttttccttgtcggcgctgctaccggcgcgcattccttcgaagtgaaactgcaggagtcaggacctggcctggtggcgccctcacagagcctgtccgtcacatgcactgtctcaggggtctcattacccgactatggtgtaagctggattcgccagcctccacgaaagggtctggagtggctgggagtaatatggggtagtgaaaccacatactataattcagctctcaaatccagactgaccatcatcaaggacaactccaagagccaagttttcttaaaaatgaacagtctgcaaactgatgacacagccatttactactgtgccaaacattattactacggtggtagctatgctatggactactggggccaaggaacctcagtcaccgtctcctcaacgcgtgagcagaaactgatctcggaagaggatgggagcggcatccagaaccctgatcctgccgtgtaccagctgcgggatagcaagagcagcgacaagagcgtgtgtctgttcaccgacttcgacagccagaccaacgtgtcccagagcaaggactccgacgtgtacatcaccgataagtgcgtgctggacatgcggagcatggacttcaagagcaactccgccgtggcctggtccaacaagtccgatttcgcctgcgccaacgccttcaacaacagcattatccccgaggacacattcttcccaagcagcgacgtgccctgcgacgtgaagctggtggaaaagagcttcgagacagacaccaacctgaacttccagaacctgagcgtgatcggcttcagaatcctgctgctgaaagtggccggctttaacctgctgatgaccctgcggctgtggtccagccgcgccaagagaagcggatctggcgtgaagcagaccctgaatttcgacctgctgaagctggctggcgacgtggaatccaacccaggcccttctagaggccatatgaccgagtacaagcccacggtgcgcctcgccacccgcgacgacgtccccagggccgtacgcaccctcgccgccgcgttcgccgactaccccgccacgcgccacaccgtcgatccggaccgccacatcgagcgggtcaccgagctgcaagaactcttcctcacgcgcgtcgggctcgacatcggcaaggtgtgggtcgcggacgacggcgccgcggtggcggtctggaccacgccggagagcgtcgaagcgggggcggtgttcgccgagatcggcccgcgcatggccgagttgagcggttcccggctggccgcgcagcaacagatggaaggcctcctggcgccgcaccggcccaaggagcccgcgtggttcctggccaccgtcggcgtctcgcccgaccaccagggcaagggtctgggcagcgccgtcgtgctccccggagtggaggcggccgagcgcgccggggtgcccgccttcctggagacctccgcgccccgcaacctccccttctacgagcggctcggcttcaccgtcaccgccgacgtcgaggtgcccgaaggaccgcgcacctggtgcatgacccgcaagcccggtgcctgagtcgacgaacgctgacgtcatcaacccgctccaaggaatcgcgggcccagtgtcactaggcgggaacacccagcgcgcgtgcgccctggcaggaagatggctgtgagggacaggggagtggcgccctgcaatatttgcatgtcgctatgtgttctgggaaatcaccataaacgtgaaatgtctttggatttgggaatcttataagttctgtatgagaccactctttcccgagagcacacctattcagcaactcgagttgctgaataggtgtgctctcttttttccggactatagtgtcacctaaatgctagacgtacctttaagaccaatgacttacaaggcagctgtagatcttagccactttttaaaagaaaaggggggactggaagggctaattcactcccaacgaagacaagatctgctttttgcttgtactgggtctctctggttagaccagatctgagcctgggagctctctggctaactagggaacccactgcttaagcctcaataaagcttgccttgagtgcttcaagtagtgtgtgcccgtctgttgtgtgactctggtaactagagatccctcagacccttttagtcagtgtggaaaatctctagcagtagtagttcatgtcatcttattattcagtatttataacttgcaaagaaatgaatatcagagagtgagaggaacttgtttattgcagcttataatggttacaaataaagcaatagcatcacaaatttcacaaataaagcatttttttcactgcattctagttgtggtttgtccaaactcatcaatgtatcttatcatgtctggctctagctatcccgcccctaactccgcccatcccgcccctaactccgcccagttccgcccattctccgccccatggctgactaattttttttatttatgcagaggccgaggccgcctcggcctctgagctattccagaagtagtgaggaggcttttttggaggcctagggacgtacccaattcgccctatagtgagtcgtattacgcgcgctcactggccgtcgttttacaacgtcgtgactgggaaaaccctggcgttacccaacttaatcgccttgcagcacatccccctttcgccagctggcgtaatagcgaagaggcccgcaccgatcgcccttcccaacagttgcgcagcctgaatggcgaatgggacgcgccctgtagcggcgcattaagcgcggcgggtgtggtggttacgcgcagcgtgaccgctacacttgccagcgccctagcgcccgctcctttcgctttcttcccttcctttctcgccacgttcgccggctttccccgtcaagctctaaatcgggggctccctttagggttccgatttagtgctttacggcacctcgaccccaaaaaacttgattagggtgatggttcacgtagtgggccatcgccctgatagacggtttttcgccctttgacgttggagtccacgttctttaatagtggactcttgttccaaactggaacaacactcaaccctatctcggtctattcttttgatttataagggattttgccgatttcggcctattggttaaaaaatgagctgatttaacaaaaatttaacgcgaattttaacaaaatattaacgcttacaatttaggtggcacttttcggggaaatgtgcgcggaacccctatttgtttatttttctaaatacattcaaatatgtatccgctcatgagacaataaccctgataaatgcttcaataatattgaaaaaggaagagtatgagtattcaacatttccgtgtcgcccttattcccttttttgcggcattttgccttcctgtttttgctcacccagaaacgctggtgaaagtaaaagatgctgaagatcagttgggtgcacgagtgggttacatcgaactggatctcaacagcggtaagatccttgagagttttcgccccgaagaacgttttccaatgatgagcacttttaaagttctgctatgtggcgcggtattatcccgtattgacgccgggcaagagcaactcggtcgccgcatacactattctcagaatgacttggttgagtactcaccagtcacagaaaagcatcttacggatggcatgacagtaagagaattatgcagtgctgccataaccatgagtgataacactgcggccaacttacttctgacaacgatcggaggaccgaaggagctaaccgcttttttgcacaacatgggggatcatgtaactcgccttgatcgttgggaaccggagctgaatgaagccataccaaacgacgagcgtgacaccacgatgcctgtagcaatggcaacaacgttgcgcaaactattaactggcgaactacttactctagcttcccggcaacaattaatagactggatggaggcggataaagttgcaggaccacttctgcgctcggcccttccggctggctggtttattgctgataaatctggagccggtgagcgtgggtctcgcggtatcattgcagcactggggccagatggtaagccctcccgtatcgtagttatctacacgacggggagtcaggcaactatggatgaacgaaatagacagatcgctgagataggtgcctcactgattaagcattggtaactgtcagaccaagtttactcatatatactttagattgatttaaaacttcatttttaatttaaaaggatctaggtgaagatcctttttgataatctcatgaccaaaatcccttaacgtgagttttcgttccactgagcgtcagaccccgtagaaaagatcaaaggatcttcttgagatcctttttttctgcgcgtaatctgctgcttgcaaacaaaaaaaccaccgctaccagcggtggtttgtttgccggatcaagagctaccaactctttttccgaaggtaactggcttcagcagagcgcagataccaaatactgttcttctagtgtagccgtagttaggccaccacttcaagaactctgtagcaccgcctacatacctcgctctgctaatcctgttaccagtggctgctgccagtggcgataagtcgtgtcttaccgggttggactcaagacgatagttaccggataaggcgcagcggtcgggctgaacggggggttcgtgcacacagcccagcttggagcgaacgacctacaccgaactgagatacctacagcgtgagctatgagaaagcgccacgcttcccgaagggagaaaggcggacaggtatccggtaagcggcagggtcggaacaggagagcgcacgagggagcttccagggggaaacgcctggtatctttatagtcctgtcgggtttcgccacctctgacttgagcgtcgatttttgtgatgctcgtcaggggggcggagcctatggaaaaacgccagcaacgcggcctttttacggttcctggccttttgctggccttttgctcacatgttctttcctgcgttatcccctgattctgtggataaccgtattaccgcctttgagtgagctgataccgctcgccgcagccgaacgaccgagcgcagcgagtcagtgagcgaggaagcggaagagcgcccaatacgcaaaccgcctctccccgcgcgttggccgattcattaatgcagctggcacgacaggtttcccgactggaaagcgggcagtgagcgcaacgcaattaatgtgagttagctcactcattaggcaccccaggctttacactttatgcttccggctcgtatgttgtgtggaattgtgagcggataacaatttcacacaggaaacagctatgaccatgattacgccaagcgcgcaattaaccctcactaaagggaacaaaagctggagctgcaagctt

SEQ ID NO: 357 - DNA, 8901 bp, Artificial Sequence
  Synthetic Polynucleotide
ttggggttgcgccttttccaaggcagccctgggtttgcgcagggacgcggctgctctgggcgtggttccgggaaacgcagcggcgccgaccctgggtctcgcacattcttcacgtccgttcgcagcgtcacccggatcttcgccgctacccttgtgggccccccggcgacgcttcctgctccgcccctaagtcgggaaggttccttgcggttcgcggcgtgccggacgtgacaaacggaagccgcacgtctcactagtaccctcgcagacggacagcgccagggagcaatggcagcgcgccgaccgcgatgggctgtggccaatagcggctgctcagcagggcgcgccgagagcagcggccgggaaggggcggtgcgggaggcggggtgtggggcggtagtgtgggccctgttcctgcccgcgcggtgttccgcattctgcaagcctccggagcgcacgtcggcagtcggctccctcgttgaccgaatcaccgacctctctccccagggggatccaccggagcttaccatgaccgagtacaagcccacggtgcgcctcgccacccgcgacgacgtccccagggccgtacgcaccctcgccgccgcgttcgccgactaccccgccacgcgccacaccgtcgatccggaccgccacatcgagcgggtcaccgagctgcaagaactcttcctcacgcgcgtcgggctcgacatcggcaaggtgtgggtcgcggacgacggcgccgcggtggcggtctggaccacgccggagagcgtcgaagcgggggcggtgttcgccgagatcggcccgcgcatggccgagttgagcggttcccggctggccgcgcagcaacagatggaaggcctcctggcgccgcaccggcccaaggagcccgcgtggttcctggccaccgtcggcgtctcgcccgaccaccagggcaagggtctgggcagcgccgtcgtgctccccggagtggaggcggccgagcgcgccggggtgcccgccttcctggagacctccgcgccccgcaacctccccttctacgagcggctcggcttcaccgtcaccgccgacgtcgaggtgcccgaaggaccgcgcacctggtgcatgacccgcaagcccggtgcctgacgcccgccccacgacccgcagcgcccgaccgaaaggagcgcacgaccccatgcatcggtacctttaagaccaatgacttacaaggcagctgtagatcttagccactttttaaaagaaaaggggggactggaagggctaattcactcccaacgaagacaagatctgctttttgcttgtactgggtctctctggttagaccagatctgagcctgggagctctctggctaactagggaacccactgcttaagcctcaataaagcttgccttgagtgcttcaagtagtgtgtgcccgtctgttgtgtgactctggtaactagagatccctcagacccttttagtcagtgtggaaaatctctagcagtagtagttcatgtcatcttattattcagtatttataacttgcaaagaaatgaatatcagagagtgagaggaacttgtttattgcagcttataatggttacaaataaagcaatagcatcacaaatttcacaaataaagcatttttttcactgcattctagttgtggtttgtccaaactcatcaatgtatcttatcatgtctggctctagctatcccgcccctaactccgcccatcccgcccctaactccgcccagttccgcccattctccgccccatggctgactaattttttttatttatgcagaggccgaggccgcctcggcctctgagctattccagaagtagtgaggaggcttttttggaggcctagggacgtacccaattcgccctatagtgagtcgtattacgcgcgctcactggccgtcgttttacaacgtcgtgactgggaaaaccctggcgttacccaacttaatcgccttgcagcacatccccctttcgccagctggcgtaatagcgaagaggcccgcaccgatcgcccttcccaacagttgcgcagcctgaatggcgaatgggacgcgccctgtagcggcgcattaagcgcggcgggtgtggtggttacgcgcagcgtgaccgctacacttgccagcgccctagcgcccgctcctttcgctttcttcccttcctttctcgccacgttcgccggctttccccgtcaagctctaaatcgggggctccctttagggttccgatttagtgctttacggcacctcgaccccaaaaaacttgattagggtgatggttcacgtagtgggccatcgccctgatagacggtttttcgccctttgacgttggagtccacgttctttaatagtggactcttgttccaaactggaacaacactcaaccctatctcggtctattcttttgatttataagggattttgccgatttcggcctattggttaaaaaatgagctgatttaacaaaaatttaacgcgaattttaacaaaatattaacgcttacaatttaggtggcacttttcggggaaatgtgcgcggaacccctatttgtttatttttctaaatacattcaaatatgtatccgctcatgagacaataaccctgataaatgcttcaataatattgaaaaaggaagagtatgagtattcaacatttccgtgtcgcccttattcccttttttgcggcattttgccttcctgtttttgctcacccagaaacgctggtgaaagtaaaagatgctgaagatcagttgggtgcacgagtgggttacatcgaactggatctcaacagcggtaagatccttgagagttttcgccccgaagaacgttttccaatgatgagcacttttaaagttctgctatgtggcgcggtattatcccgtattgacgccgggcaagagcaactcggtcgccgcatacactattctcagaatgacttggttgagtactcaccagtcacagaaaagcatcttacggatggcatgacagtaagagaattatgcagtgctgccataaccatgagtgataacactgcggccaacttacttctgacaacgatcggaggaccgaaggagctaaccgcttttttgcacaacatgggggatcatgtaactcgccttgatcgttgggaaccggagctgaatgaagccataccaaacgacgagcgtgacaccacgatgcctgtagcaatggcaacaacgttgcgcaaactattaactggcgaactacttactctagcttcccggcaacaattaatagactggatggaggcggataaagttgcaggaccacttctgcgctcggcccttccggctggctggtttattgctgataaatctggagccggtgagcgtgggtctcgcggtatcattgcagcactggggccagatggtaagccctcccgtatcgtagttatctacacgacggggagtcaggcaactatggatgaacgaaatagacagatcgctgagataggtgcctcactgattaagcattggtaactgtcagaccaagtttactcatatatactttagattgatttaaaacttcatttttaatttaaaaggatctaggtgaagatcctttttgataatctcatgaccaaaatcccttaacgtgagttttcgttccactgagcgtcagaccccgtagaaaagatcaaaggatcttcttgagatcctttttttctgcgcgtaatctgctgcttgcaaacaaaaaaaccaccgctaccagcggtggtttgtttgccggatcaagagctaccaactctttttccgaaggtaactggcttcagcagagcgcagataccaaatactgttcttctagtgtagccgtagttaggccaccacttcaagaactctgtagcaccgcctacatacctcgctctgctaatcctgttaccagtggctgctgccagtggcgataagtcgtgtcttaccgggttggactcaagacgatagttaccggataaggcgcagcggtcgggctgaacggggggttcgtgcacacagcccagcttggagcgaacgacctacaccgaactgagatacctacagcgtgagctatgagaaagcgccacgcttcccgaagggagaaaggcggacaggtatccggtaagcggcagggtcggaacaggagagcgcacgagggagcttccagggggaaacgcctggtatctttatagtcctgtcgggtttcgccacctctgacttgagcgtcgatttttgtgatgctcgtcaggggggcggagcctatggaaaaacgccagcaacgcggcctttttacggttcctggccttttgctggccttttgctcacatgttctttcctgcgttatcccctgattctgtggataaccgtattaccgcctttgagtgagctgataccgctcgccgcagccgaacgaccgagcgcagcgagtcagtgagcgaggaagcggaagagcgcccaatacgcaaaccgcctctccccgcgcgttggccgattcattaatgcagctggcacgacaggtttcccgactggaaagcgggcagtgagcgcaacgcaattaatgtgagttagctcactcattaggcaccccaggctttacactttatgcttccggctcgtatgttgtgtggaattgtgagcggataacaatttcacacaggaaacagctatgaccatgattacgccaagcgcgcaattaaccctcactaaagggaacaaaagctggagctgcaagcttaatgtagtcttatgcaatactcttgtagtcttgcaacatggtaacgatgagttagcaacatgccttacaaggagagaaaaagcaccgtgcatgccgattggtggaagtaaggtggtacgatcgtgccttattaggaaggcaacagacgggtctgacatggattggacgaaccactgaattgccgcattgcagagatattgtatttaagtgcctagctcgatacataaacgggtctctctggttagaccagatctgagcctgggagctctctggctaactagggaacccactgcttaagcctcaataaagcttgccttgagtgcttcaagtagtgtgtgcccgtctgttgtgtgactctggtaactagagatccctcagacccttttagtcagtgtggaaaatctctagcagtggcgcccgaacagggacttgaaagcgaaagggaaaccagaggagctctctcgacgcaggactcggcttgctgaagcgcgcacggcaagaggcgaggggcggcgactggtgagtacgccaaaaattttgactagcggaggctagaaggagagagatgggtgcgagagcgtcagtattaagcgggggagaattagatcgcgatgggaaaaaattcggttaaggccagggggaaagaaaaaatataaattaaaacatatagtatgggcaagcagggagctagaacgattcgcagttaatcctggcctgttagaaacatcagaaggctgtagacaaatactgggacagctacaaccatcccttcagacaggatcagaagaacttagatcattatataatacagtagcaaccctctattgtgtgcatcaaaggatagagataaaagacaccaaggaagctttagacaagatagaggaagagcaaaacaaaagtaagaccaccgcacagcaagcggccgctgatcttcagacctggaggaggagatatgagggacaattggagaagtgaattatataaatataaagtagtaaaaattgaaccattaggagtagcacccaccaaggcaaagagaagagtggtgcagagagaaaaaagagcagtgggaataggagctttgttccttgggttcttgggagcagcaggaagcactatgggcgcagcgtcaatgacgctgacggtacaggccagacaattattgtctggtatagtgcagcagcagaacaatttgctgagggctattgaggcgcaacagcatctgttgcaactcacagtctggggcatcaagcagctccaggcaagaatcctggctgtggaaagatacctaaaggatcaacagctcctggggatttggggttgctctggaaaactcatttgcaccactgctgtgccttggaatgctagttggagtaataaatctctggaacagatttggaatcacacgacctggatggagtgggacagagaaattaacaattacacaagcttaatacactccttaattgaagaatcgcaaaaccagcaagaaaagaatgaacaagaattattggaattagataaatgggcaagtttgtggaattggtttaacataacaaattggctgtggtatataaaattattcataatgatagtaggaggcttggtaggtttaagaatagtttttgctgtactttctatagtgaatagagttaggcagggatattcaccattatcgtttcagacccacctcccaaccccgaggggacccgacaggcccgaaggaatagaagaagaaggtggagagagagacagagacagatccattcgattagtgaacggatctcgacggtatcgatcacgagactagcctcgagcggccgcccccttcaccgagggcctatttcccatgattccttcatatttgcatatacgatacaaggctgttagagagataattggaattaatttgactgtaaacacaaagatattagtacaaaatacgtgacgtagaaagtaataatttcttgggtagtttgcagttttaaaattatgttttaaaatggactatcatatgcttaccgtaacttgaaagtatttcgatttcttggctttatatatcttgtggaaaggacgaaacaccggtgtgttgtaaatgagcacacaaaatacacatgctaaaatattatattctatgacctttataaaatcaaccaaaatcttctttttaataactttagtatcaataattagaatttttatgttcctttttgcaaacttttaataaaaatgagcaaaataaaaaaacgctagttttagtaactcgcgttgttttcttcacctttaataatagctactccaccacttgttcctaagcggtcagctcctgcttcaatcattttttgagcatcttcaaatgttctaactccaccagctgctttaactaaagcattgtctttaacaactgacttcattagtttaacatcttcaaatgttgcacctgattttgaaaatcctgttgatgttttaacaaattctaatccagcttcaacagctatttcacaagctttcatgatttcttcttttgttaataaacaattttccataatacatttaacaacatgtgatccagctgctttttttacagctttcatgtcttctaaaactaattcataatttttgtcttttaatgcaccaatatttaataccatatcaatttctgttgcaccatctttaattgcttcagaaacttcgaatgcttttgtagctgttgtgcatgcacctagaggaaaacctacaacatttgttattcctacatttgtgccttttaataattctttacaatagcttgttcaatatgaattaacacaaactgttgcaaaatcaaattcaattgcttcatcacataattgtttaatttcagctttcgtagcatcttgttttaataatgtgtgatctatatatttgtttagtttcattttttctcctatatattcatttttaattttaattctttaataatttcgtctactttaactttagcgttttgaacagattcaccaacacctataaaataaatttttagtttaggttcagttccacttgggcgaacagcaaatcatgacttatcttctaaataaaattttagtaagtcttgtcctggcatattatacattccatcgatgtagtcttcaacattaacaactttaagtccagcaatttgagttaagggtgttgctctcaatgatttcattaatggttcaatttttaatttcttttcttctggtttaaaattcaagtttaaagtgaaagtgtaatatgcacccatttctttaaataaatcttctaaatagtctactaatgttttattttgttttttataaaatcaagcagcctctgctattaatatagaagcttgtattccatctttatctctagctgagtcatcaattacatatccataactttcttcataagcaaaaacaaaatttaatccgttatcttcttctttagcaatttctctacccattcatttaaatccagttaaagtttttacaatattaactccatatttttcatgagcgattctatcacccaaatcacttgttacaaaacttgaatatagagccggattttttggaatgctatttaagcgttttagatttgataattttcaatcaattaaaattggtcctgtttgatttccatctaatcttacaaaatgaccatcatgttttattgccattccaaatctgtcagcatctgggtcattcataataataatatctgcatcatgtttaataccatattcaagcggtatttttcatgcaggatcaaattctggatttggatttacaacatttttaaatgtttcatcttcaaatgcatgctcttcaacctcaataacgttatatcctgattcacgtaatatttttggggtaaatttagttcctgttccattaactgcgctaaaaataatttttaaatcttttttagcttcttgctcttttttgtagaattctcgacctcgagacaaatggcagtattcatccacaattttaaaagaaaaggggggattggggggtacagtgcaggggaaagaatagtagacataatagcaacagacatacaaactaaagaattacaaaaacaaattacaaaaattcaaaattttcgggtttattacagggacagcagagatccactttggccgcggctcgaggggg

SEQ ID NO: 358 - DNA, 7446 bp, Artificial Sequence
  Synthetic Polynucleotide
cctgcaggcagctgcgcgctcgctcgctcactgaggccgcccgggcgtcgggcgacctttggtcgcccggcctcagtgagcgagcgagcgcgcagagagggagtggccaactccatcactaggggttcctgcggcctctagactcgaggcgttgacattgattattgactagttattaatagtaatcaattacggggtcattagttcatagcccatatatggagttccgcgttacataacttacggtaaatggcccgcctggctgaccgcccaacgacccccgcccattgacgtcaataatgacgtatgttcccatagtaacgccaatagggactttccattgacgtcaatgggtggagtatttacggtaaactgcccacttggcagtacatcaagtgtatcatatgccaagtacgccccctattgacgtcaatgacggtaaatggcccgcctggcattatgcccagtacatgaccttatgggactttcctacttggcagtacatctacgtattagtcatcgctattaccatggtgatgcggttttggcagtacatcaatgggcgtggatagcggtttgactcacggggatttccaagtctccaccccattgacgtcaatgggagtttgttttggcaccaaaatcaacgggactttccaaaatgtcgtaacaactccgccccattgacgcaaatgggcggtaggcgtgtacggtgggaggtctatataagcagagctctctggctaactaccggtgccaccatggccccaaagaagaagcggaaggtcggtatccacggagtcccagcagccaagcggaactacatcctgggcctggacatcggcatcaccagcgtgggctacggcatcatcgactacgagacacgggacgtgatcgatgccggcgtgcggctgttcaaagaggccaacgtggaaaacaacgagggcaggcggagcaagagaggcgccagaaggctgaagcggcggaggcggcatagaatccagagagtgaagaagctgctgttcgactacaacctgctgaccgaccacagcgagctgagcggcatcaacccctacgaggccagagtgaagggcctgagccagaagctgagcgaggaagagttctctgccgccctgctgcacctggccaagagaagaggcgtgcacaacgtgaacgaggtggaagaggacaccggcaacgagctgtccaccaaagagcagatcagccggaacagcaaggccctggaagagaaatacgtggccgaactgcagctggaacggctgaagaaagacggcgaagtgcggggcagcatcaacagattcaagaccagcgactacgtgaaagaagccaaacagctgctgaaggtgcagaaggcctaccaccagctggaccagagcttcatcgacacctacatcgacctgctggaaacccggcggacctactatgagggacctggcgagggcagccccttcggctggaaggacatcaaagaatggtacgagatgctgatgggccactgcacctacttccccgaggaactgcggagcgtgaagtacgcctacaacgccgacctgtacaacgccctgaacgacctgaacaatctcgtgatcaccagggacgagaacgagaagctggaatattacgagaagttccagatcatcgagaacgtgttcaagcagaagaagaagcccaccctgaagcagatcgccaaagaaatcctcgtgaacgaagaggatattaagggctacagagtgaccagcaccggcaagcccgagttcaccaacctgaaggtgtaccacgacatcaaggacattaccgcccggaaagagattattgagaacgccgagctgctggatcagattgccaagatcctgaccatctaccagagcagcgaggacatccaggaagaactgaccaatctgaactccgagctgacccaggaagagatcgagcagatctctaatctgaagggctataccggcacccacaacctgagcctgaaggccatcaacctgatcctggacgagctgtggcacaccaacgacaaccagatcgctatcttcaaccggctgaagctggtgcccaagaaggtggacctgtcccagcagaaagagatccccaccaccctggtggacgacttcatcctgagccccgtcgtgaagagaagcttcatccagagcatcaaagtgatcaacgccatcatcaagaagtacggcctgcccaacgacatcattatcgagctggcccgcgagaagaactccaaggacgcccagaaaatgatcaacgagatgcagaagcggaaccggcagaccaacgagcggatcgaggaaatcatccggaccaccggcaaagagaacgccaagtacctgatcgagaagatcaagctgcacgacatgcaggaaggcaagtgcctgtacagcctggaagccatccctctggaagatctgctgaacaaccccttcaactatgaggtggaccacatcatccccagaagcgtgtccttcgacaacagcttcaacaacaaggtgctcgtgaagcaggaagaaaacagcaagaagggcaaccggaccccattccagtacctgagcagcagcgacagcaagatcagctacgaaaccttcaagaagcacatcctgaatctggccaagggcaagggcagaatcagcaagaccaagaaagagtatctgctggaagaacgggacatcaacaggttctccgtgcagaaagacttcatcaaccggaacctggtggataccagatacgccaccagaggcctgatgaacctgctgcggagctacttcagagtgaacaacctggacgtgaaagtgaagtccatcaatggcggcttcaccagctttctgcggcggaagtggaagtttaagaaagagcggaacaaggggtacaagcaccacgccgaggacgccctgatcattgccaacgccgatttcatcttcaaagagtggaagaaactggacaaggccaaaaaagtgatggaaaaccagatgttcgaggaaaagcaggccgagagcatgcccgagatcgaaaccgagcaggagtacaaagagatcttcatcaccccccaccagatcaagcacattaaggacttcaaggactacaagtacagccaccgggtggacaagaagcctaatagagagctgattaacgacaccctgtactccacccggaaggacgacaagggcaacaccctgatcgtgaacaatctgaacggcctgtacgacaaggacaatgacaagctgaaaaagctgatcaacaagagccccgaaaagctgctgatgtaccaccacgacccccagacctaccagaaactgaagctgattatggaacagtacggcgacgagaagaatcccctgtacaagtactacgaggaaaccgggaactacctgaccaagtactccaaaaaggacaacggccccgtgatcaagaagattaagtattacggcaacaaactgaacgcccatctggacatcaccgacgactaccccaacagcagaaacaaggtcgtgaagctgtccctgaagccctacagattcgacgtgtacctggacaatggcgtgtacaagttcgtgaccgtgaagaatctggatgtgatcaaaaaagaaaactactacgaagtgaatagcaagtgctatgaggaagctaagaagctgaagaagatcagcaaccaggccgagtttatcgcctccttctacaacaacgatctgatcaagatcaacggcgagctgtatagagtgatcggcgtgaacaacgacctgctgaaccggatcgaagtgaacatgatcgacatcacctaccgcgagtacctggaaaacatgaacgacaagaggccccccaggatcattaagacaatcgcctccaagacccagagcattaagaagtacagcacagacattctgggcaacctgtatgaagtgaaatctaagaagcaccctcagatcatcaaaaagggcaaaaggccggcggccacgaaaaaggccggccaggcaaaaaagaaaaagggatcctacccatacgatgttccagattacgcttacccatacgatgttccagattacgcttacccatacgatgttccagattacgcttaagaattcctagagctcgctgatcagcctcgactgtgccttctagttgccagccatctgttgtttgcccctcccccgtgccttccttgaccctggaaggtgccactcccactgtcctttcctaataaaatgaggaaattgcatcgcattgtctgagtaggtgtcattctattctggggggtggggtggggcaggacagcaagggggaggattgggaagagaatagcaggcatgctggggaggtaccgagggcctatttcccatgattccttcatatttgcatatacgatacaaggctgttagagagataattggaattaatttgactgtaaacacaaagatattagtacaaaatacgtgacgtagaaagtaataatttcttgggtagtttgcagttttaaaattatgttttaaaatggactatcatatgcttaccgtaacttgaaagtatttcgatttcttggctttatatatcttgtggaaaggacgaaacaccggagaccacggcaggtctcagttttagtactctggaaacagaatctactaaaacaaggcaaaatgccgtgtttatctcgtcaacttgttggcgagatttttgcggccgcaggaacccctagtgatggagttggccactccctctctgcgcgctcgctcgctcactgaggccgggcgaccaaaggtcgcccgacgcccgggctttgcccgggcggcctcagtgagcgagcgagcgcgcagctgcctgcaggggcgcctgatgcggtattttctccttacgcatctgtgcggtatttcacaccgcatacgtcaaagcaaccatagtacgcgccctgtagcggcgcattaagcgcggcgggtgtggtggttacgcgcagcgtgaccgctacacttgccagcgccttagcgcccgctcctttcgctttcttcccttcctttctcgccacgttcgccggctttccccgtcaagctctaaatcgggggctccctttagggttccgatttagtgctttacggcacctcgaccccaaaaaacttgatttgggtgatggttcacgtagtgggccatcgccctgatagacggtttttcgccctttgacgttggagtccacgttctttaatagtggactcttgttccaaactggaacaacactcaactctatctcgggctattcttttgatttataagggattttgccgatttcggtctattggttaaaaaatgagctgatttaacaaaaatttaacgcgaattttaacaaaatattaacgtttacaattttatggtgcactctcagtacaatctgctctgatgccgcatagttaagccagccccgacacccgccaacacccgctgacgcgccctgacgggcttgtctgctcccggcatccgcttacagacaagctgtgaccgtctccgggagctgcatgtgtcagaggttttcaccgtcatcaccgaaacgcgcgagacgaaagggcctcgtgatacgcctatttttataggttaatgtcatgataataatggtttcttagacgtcaggtggcacttttcggggaaatgtgcgcggaacccctatttgtttatttttctaaatacattcaaatatgtatccgctcatgagacaataaccctgataaatgcttcaataatattgaaaaaggaagagtatgagtattcaacatttccgtgtcgcccttattcccttttttgcggcattttgccttcctgtttttgctcacccagaaacgctggtgaaagtaaaagatgctgaagatcagttgggtgcacgagtgggttacatcgaactggatctcaacagcggtaagatccttgagagttttcgccccgaagaacgttttccaatgatgagcacttttaaagttctgctatgtggcgcggtattatcccgtattgacgccgggcaagagcaactcggtcgccgcatacactattctcagaatgacttggttgagtactcaccagtcacagaaaagcatcttacggatggcatgacagtaagagaattatgcagtgctgccataaccatgagtgataacactgcggccaacttacttctgacaacgatcggaggaccgaaggagctaaccgcttttttgcacaacatgggggatcatgtaactcgccttgatcgttgggaaccggagctgaatgaagccataccaaacgacgagcgtgacaccacgatgcctgtagcaatggcaacaacgttgcgcaaactattaactggcgaactacttactctagcttcccggcaacaattaatagactggatggaggcggataaagttgcaggaccacttctgcgctcggcccttccggctggctggtttattgctgataaatctggagccggtgagcgtggaagccgcggtatcattgcagcactggggccagatggtaagccctcccgtatcgtagttatctacacgacggggagtcaggcaactatggatgaacgaaatagacagatcgctgagataggtgcctcactgattaagcattggtaactgtcagaccaagtttactcatatatactttagattgatttaaaacttcatttttaatttaaaaggatctaggtgaagatcctttttgataatctcatgaccaaaatcccttaacgtgagttttcgttccactgagcgtcagaccccgtagaaaagatcaaaggatcttcttgagatcctttttttctgcgcgtaatctgctgcttgcaaacaaaaaaaccaccgctaccagcggtggtttgtttgccggatcaagagctaccaactctttttccgaaggtaactggcttcagcagagcgcagataccaaatactgttcttctagtgtagccgtagttaggccaccacttcaagaactctgtagcaccgcctacatacctcgctctgctaatcctgttaccagtggctgctgccagtggcgataagtcgtgtcttaccgggttggactcaagacgatagttaccggataaggcgcagcggtcgggctgaacggggggttcgtgcacacagcccagcttggagcgaacgacctacaccgaactgagatacctacagcgtgagctatgagaaagcgccacgcttcccgaagggagaaaggcggacaggtatccggtaagcggcagggtcggaacaggagagcgcacgagggagcttccagggggaaacgcctggtatctttatagtcctgtcgggtttcgccacctctgacttgagcgtcgatttttgtgatgctcgtcaggggggcggagcctatggaaaaacgccagcaacgcggcctttttacggttcctggccttttgctggccttttgctcacatgt

SEQ ID NO: 359 - DNA, 14873 bp, Artificial Sequence
  Synthetic Polynucleotide
tgatgcggttttggcagtacatcaatgggcgtggatagcggtttgactcacggggatttccaagtctccaccccattgacgtcaatgggagtttgttttggcaccaaaatcaacgggactttccaaaatgtcgtaacaactccgccccattgacgcaaatgggcggtaggcgtgtacggtgggaggtctatataagcagcgcgttttgcctgtactgggtctctctggttagaccagatctgagcctgggagctctctggctaactagggaacccactgcttaagcctcaataaagcttgccttgagtgcttcaagtagtgtgtgcccgtctgttgtgtgactctggtaactagagatccctcagacccttttagtcagtgtggaaaatctctagcagtggcgcccgaacagggacttgaaagcgaaagggaaaccagaggagctctctcgacgcaggactcggcttgctgaagcgcgcacggcaagaggcgaggggcggcgactggtgagtacgccaaaaattttgactagcggaggctagaaggagagagatgggtgcgagagcgtcagtattaagcgggggagaattagatcgcgatgggaaaaaattcggttaaggccagggggaaagaaaaaatataaattaaaacatatagtatgggcaagcagggagctagaacgattcgcagttaatcctggcctgttagaaacatcagaaggctgtagacaaatactgggacagctacaaccatcccttcagacaggatcagaagaacttagatcattatataatacagtagcaaccctctattgtgtgcatcaaaggatagagataaaagacaccaaggaagctttagacaagatagaggaagagcaaaacaaaagtaagaccaccgcacagcaagcggccgctgatcttcagacctggaggaggagatatgagggacaattggagaagtgaattatataaatataaagtagtaaaaattgaaccattaggagtagcacccaccaaggcaaagagaagagtggtgcagagagaaaaaagagcagtgggaataggagctttgttccttgggttcttgggagcagcaggaagcactatgggcgcagcgtcaatgacgctgacggtacaggccagacaattattgtctggtatagtgcagcagcagaacaatttgctgagggctattgaggcgcaacagcatctgttgcaactcacagtctggggcatcaagcagctccaggcaagaatcctggctgtggaaagatacctaaaggatcaacagctcctggggatttggggttgctctggaaaactcatttgcaccactgctgtgccttggaatgctagttggagtaataaatctctggaacagatttggaatcacacgacctggatggagtgggacagagaaattaacaattacacaagcttaatacactccttaattgaagaatcgcaaaaccagcaagaaaagaatgaacaagaattattggaattagataaatgggcaagtttgtggaattggtttaacataacaaattggctgtggtatataaaattattcataatgatagtaggaggcttggtaggtttaagaatagtttttgctgtactttctatagtgaatagagttaggcagggatattcaccattatcgtttcagacccacctcccaaccccgaggggacccgacaggcccgaaggaatagaagaagaaggtggagagagagacagagacagatccattcgattagtgaacggatcggcactgcgtgcgccaattctgcagacaaatggcagtattcatccacaattttaaaagaaaaggggggattggggggtacagtgcaggggaaagaatagtagacataatagcaacagacatacaaactaaagaattacaaaaacaaattacaaaaattcaaaattttcgggtttattacagggacagcagagatccagtttggttaattaaggtaccgagggcctatttcccatgattccttcatatttgcatatacgatacaaggctgttagagagataattagaattaatttgactgtaaacacaaagatattagtacaaaatacgtgacgtagaaagtaataatttcttgggtagtttgcagttttaaaattatgttttaaaatggactatcatatgcttaccgtaacttgaaagtatttcgatttcttggctttatatatcttgtggaaaggacgaaacaccggagacggttgtaaatgagcacacaaaatacacatgctaaaatattatattctatgacctttataaaatcaaccaaaatcttctttttaataactttagtatcaataattagaatttttatgttcctttttgcaaacttttaataaaaatgagcaaaataaaaaaacgctagttttagtaactcgcgttgttttcttcacctttaataatagctactccaccacttgttcctaagcggtcagctcctgcttcaatcattttttgagcatcttcaaatgttctaactccaccagctgctttaactaaagcattgtctttaacaactgacttcattagtttaacatcttcaaatgttgcacctgattttgaaaatcctgttgatgttttaacaaattctaatccagcttcaacagctatttcacaagctttcatgatttcttcttttgttaataaacaattttccataatacatttaacaacatgtgatccagctgctttttttacagctttcatgtcttctaaaactaattcataatttttgtcttttaatgcaccaatatttaataccatatcaatttctgttgcaccatctttaattgcttcagaaacttcgaatgcttttgtagctgttgtgcatgcacctagaggaaaacctacaacatttgttattcctacatttgtgccttttaataattctttacaatagcttgttcaatatgaattaacacaaactgttgcaaaatcaaattcaattgcttcatcacataattgtttaatttcagctttcgtagcatcttgttttaataatgtgtgatctatatatttgtttagtttcattttttctcctatatattcatttttaattttaattctttaataatttcgtctactttaactttagcgttttgaacagattcaccaacacctataaaataaatttttagtttaggttcagttccacttgggcgaacagcaaatcatgacttatcttctaaataaaattttagtaagtcttgtcctggcatattatacattccatcgatgtagtcttcaacattaacaactttaagtccagcaatttgagttaagggtgttgctctcaatgatttcattaatggttcaatttttaatttcttttcttctggtttaaaattcaagtttaaagtgaaagtgtaatatgcacccatttctttaaataaatcttctaaatagtctactaatgttttattttgttttttataaaatcaagcagcctctgctattaatatagaagcttgtattccatctttatctctagctgagtcatcaattacatatccataactttcttcataagcaaaaacaaaatttaatccgttatcttcttctttagcaatttctctacccattcatttaaatccagttaaagtttttacaatattaactccatatttttcatgagcgattctatcacccaaatcacttgttacaaaacttgaatatagagccggattttttggaatgctatttaagcgttttagatttgataattttcaatcaattaaaattggtcctgtttgatttccatctaatcttacaaaatgaccatcatgttttattgccattccaaatctgtcagcatctgggtcattcataataataatatctgcatcatgtttaataccatattcaagcggtatttttcatgcaggatcaaattctggatttggatttacaacatttttaaatgtttcatcttcaaatgcatgctcttcaacctcaataacgttatatcctgattcacgtaatatttttggggtaaatttagttcctgttccattaactgcgctaaaaataatttttaaatcttttttagcttcttgctcttttttgtacgtctctgttttagagctagaaatagcaagttaaaataaggctagtccgttatcaacttgaaaaagtggcaccgagtcggtgcttttttgaattcgctagctaggtcttgaaaggagtgggaattggctccggtgcccgtcagtgggcagagcgcacatcgcccacagtccccgagaagttggggggaggggtcggcaattgatccggtgcctagagaaggtggcgcggggtaaactgggaaagtgatgtcgtgtactggctccgcctttttcccgagggtgggggagaaccgtatataagtgcagtagtcgccgtgaacgttctttttcgcaacgggtttgccgccagaacacaggaccggttctagagcgctgccaccatggacaagaagtacagcatcggcctggacatcggcaccaactctgtgggctgggccgtgatcaccgacgagtacaaggtgcccagcaagaaattcaaggtgctgggcaacaccgaccggcacagcatcaagaagaacctgatcggagccctgctgttcgacagcggcgaaacagccgaggccacccggctgaagagaaccgccagaagaagatacaccagacggaagaaccggatctgctatctgcaagagatcttcagcaacgagatggccaaggtggacgacagcttcttccacagactggaagagtccttcctggtggaagaggataagaagcacgagcggcaccccatcttcggcaacatcgtggacgaggtggcctaccacgagaagtaccccaccatctaccacctgagaaagaaactggtggacagcaccgacaaggccgacctgcggctgatctatctggccctggcccacatgatcaagttccggggccacttcctgatcgagggcgacctgaaccccgacaacagcgacgtggacaagctgttcatccagctggtgcagacctacaaccagctgttcgaggaaaaccccatcaacgccagcggcgtggacgccaaggccatcctgtctgccagactgagcaagagcagacggctggaaaatctgatcgcccagctgcccggcgagaagaagaatggcctgttcggaaacctgattgccctgagcctgggcctgacccccaacttcaagagcaacttcgacctggccgaggatgccaaactgcagctgagcaaggacacctacgacgacgacctggacaacctgctggcccagatcggcgaccagtacgccgacctgtttctggccgccaagaacctgtccgacgccatcctgctgagcgacatcctgagagtgaacaccgagatcaccaaggcccccctgagcgcctctatgatcaagagatacgacgagcaccaccaggacctgaccctgctgaaagctctcgtgcggcagcagctgcctgagaagtacaaagagattttcttcgaccagagcaagaacggctacgccggctacattgacggcggagccagccaggaagagttctacaagttcatcaagcccatcctggaaaagatggacggcaccgaggaactgctcgtgaagctgaacagagaggacctgctgcggaagcagcggaccttcgacaacggcagcatcccccaccagatccacctgggagagctgcacgccattctgcggcggcaggaagatttttacccattcctgaaggacaaccgggaaaagatcgagaagatcctgaccttccgcatcccctactacgtgggccctctggccaggggaaacagcagattcgcctggatgaccagaaagagcgaggaaaccatcaccccctggaacttcgaggaagtggtggacaagggcgcttccgcccagagcttcatcgagcggatgaccaacttcgataagaacctgcccaacgagaaggtgctgcccaagcacagcctgctgtacgagtacttcaccgtgtataacgagctgaccaaagtgaaatacgtgaccgagggaatgagaaagcccgccttcctgagcggcgagcagaaaaaggccatcgtggacctgctgttcaagaccaaccggaaagtgaccgtgaagcagctgaaagaggactacttcaagaaaatcgagtgcttcgactccgtggaaatctccggcgtggaagatcggttcaacgcctccctgggcacataccacgatctgctgaaaattatcaaggacaaggacttcctggacaatgaggaaaacgaggacattctggaagatatcgtgctgaccctgacactgtttgaggacagagagatgatcgaggaacggctgaaaacctatgcccacctgttcgacgacaaagtgatgaagcagctgaagcggcggagatacaccggctggggcaggctgagccggaagctgatcaacggcatccgggacaagcagtccggcaagacaatcctggatttcctgaagtccgacggcttcgccaacagaaacttcatgcagctgatccacgacgacagcctgacctttaaagaggacatccagaaagcccaggtgtccggccagggcgatagcctgcacgagcacattgccaatctggccggcagccccgccattaagaagggcatcctgcagacagtgaaggtggtggacgagctcgtgaaagtgatgggccggcacaagcccgagaacatcgtgatcgaaatggccagagagaaccagaccacccagaagggacagaagaacagccgcgagagaatgaagcggatcgaagagggcatcaaagagctgggcagccagatcctgaaagaacaccccgtggaaaacacccagctgcagaacgagaagctgtacctgtactacctgcagaatgggcgggatatgtacgtggaccaggaactggacatcaaccggctgtccgactacgatgtggaccatatcgtgcctcagagctttctgaaggacgactccatcgacaacaaggtgctgaccagaagcgacaagaaccggggcaagagcgacaacgtgccctccgaagaggtcgtgaagaagatgaagaactactggcggcagctgctgaacgccaagctgattacccagagaaagttcgacaatctgaccaaggccgagagaggcggcctgagcgaactggataaggccggcttcatcaagagacagctggtggaaacccggcagatcacaaagcacgtggcacagatcctggactcccggatgaacactaagtacgacgagaatgacaagctgatccgggaagtgaaagtgatcaccctgaagtccaagctggtgtccgatttccggaaggatttccagttttacaaagtgcgcgagatcaacaactaccaccacgcccacgacgcctacctgaacgccgtcgtgggaaccgccctgatcaaaaagtaccctaagctggaaagcgagttcgtgtacggcgactacaaggtgtacgacgtgcggaagatgatcgccaagagcgagcaggaaatcggcaaggctaccgccaagtacttcttctacagcaacatcatgaactttttcaagaccgagattaccctggccaacggcgagatccggaagcggcctctgatcgagacaaacggcgaaaccggggagatcgtgtgggataagggccgggattttgccaccgtgcggaaagtgctgagcatgccccaagtgaatatcgtgaaaaagaccgaggtgcagacaggcggcttcagcaaagagtctatcctgcccaagaggaacagcgataagctgatcgccagaaagaaggactgggaccctaagaagtacggcggcttcgacagccccaccgtggcctattctgtgctggtggtggccaaagtggaaaagggcaagtccaagaaactgaagagtgtgaaagagctgctggggatcaccatcatggaaagaagcagcttcgagaagaatcccatcgactttctggaagccaagggctacaaagaagtgaaaaaggacctgatcatcaagctgcctaagtactccctgttcgagctggaaaacggccggaagagaatgctggcctctgccggcgaactgcagaagggaaacgaactggccctgccctccaaatatgtgaacttcctgtacctggccagccactatgagaagctgaagggctcccccgaggataatgagcagaaacagctgtttgtggaacagcacaagcactacctggacgagatcatcgagcagatcagcgagttctccaagagagtgatcctggccgacgctaatctggacaaagtgctgtccgcctacaacaagcaccgggataagcccatcagagagcaggccgagaatatcatccacctgtttaccctgaccaatctgggagcccctgccgccttcaagtactttgacaccaccatcgaccggaagaggtacaccagcaccaaagaggtgctggacgccaccctgatccaccagagcatcaccggcctgtacgagacacggatcgacctgtctcagctgggaggcgacaagcgacctgccgccacaaagaaggctggacaggctaagaagaagaaagattacaaagacgatgacgataagggatccggcgcaacaaacttctctctgctgaaacaagccggagatgtcgaagagaatcctggaccgaccgagtacaagcccacggtgcgcctcgccacccgcgacgacgtccccagggccgtacgcaccctcgccgccgcgttcgccgactaccccgccacgcgccacaccgtcgatccggaccgccacatcgagcgggtcaccgagctgcaagaactcttcctcacgcgcgtcgggctcgacatcggcaaggtgtgggtcgcggacgacggcgccgcggtggcggtctggaccacgccggagagcgtcgaagcgggggcggtgttcgccgagatcggcccgcgcatggccgagttgagcggttcccggctggccgcgcagcaacagatggaaggcctcctggcgccgcaccggcccaaggagcccgcgtggttcctggccaccgtcggagtctcgcccgaccaccagggcaagggtctgggcagcgccgtcgtgctccccggagtggaggcggccgagcgcgccggggtgcccgccttcctggagacctccgcgccccgcaacctccccttctacgagcggctcggcttcaccgtcaccgccgacgtcgaggtgcccgaaggaccgcgcacctggtgcatgacccgcaagcccggtgcctgaacgcgttaagtcgacaatcaacctctggattacaaaatttgtgaaagattgactggtattcttaactatgttgctccttttacgctatgtggatacgctgctttaatgcctttgtatcatgctattgcttcccgtatggctttcattttctcctccttgtataaatcctggttgctgtctctttatgaggagttgtggcccgttgtcaggcaacgtggcgtggtgtgcactgtgtttgctgacgcaacccccactggttggggcattgccaccacctgtcagctcctttccgggactttcgctttccccctccctattgccacggcggaactcatcgccgcctgccttgcccgctgctggacaggggctcggctgttgggcactgacaattccgtggtgttgtcggggaaatcatcgtcctttccttggctgctcgcctgtgttgccacctggattctgcgcgggacgtccttctgctacgtcccttcggccctcaatccagcggaccttccttcccgcggcctgctgccggctctgcggcctcttccgcgtcttcgccttcgccctcagacgagtcggatctccctttgggccgcctccccgcgtcgactttaagaccaatgacttacaaggcagctgtagatcttagccactttttaaaagaaaaggggggactggaagggctaattcactcccaacgaagacaagatctgctttttgcttgtactgggtctctctggttagaccagatctgagcctgggagctctctggctaactagggaacccactgcttaagcctcaataaagcttgccttgagtgcttcaagtagtgtgtgcccgtctgttgtgtgactctggtaactagagatccctcagacccttttagtcagtgtggaaaatctctagcagggcccgtttaaacccgctgatcagcctcgactgtgccttctagttgccagccatctgttgtttgcccctcccccgtgccttccttgaccctggaaggtgccactcccactgtcctttcctaataaaatgaggaaattgcatcgcattgtctgagtaggtgtcattctattctggggggtggggtggggcaggacagcaagggggaggattgggaagacaatagcaggcatgctggggatgcggtgggctctatggcttctgaggcggaaagaaccagctggggctctagggggtatccccacgcgccctgtagcggcgcattaagcgcggcgggtgtggtggttacgcgcagcgtgaccgctacacttgccagcgccctagcgcccgctcctttcgctttcttcccttcctttctcgccacgttcgccggctttccccgtcaagctctaaatcgggggctccctttagggttccgatttagtgctttacggcacctcgaccccaaaaaacttgattagggtgatggttcacgtagtgggccatcgccctgatagacggtttttcgccctttgacgttggagtccacgttctttaatagtggactcttgttccaaactggaacaacactcaaccctatctcggtctattcttttgatttataagggattttgccgatttcggcctattggttaaaaaatgagctgatttaacaaaaatttaacgcgaattaattctgtggaatgtgtgtcagttagggtgtggaaagtccccaggctccccagcaggcagaagtatgcaaagcatgcatctcaattagtcagcaaccaggtgtggaaagtccccaggctccccagcaggcagaagtatgcaaagcatgcatctcaattagtcagcaaccatagtcccgcccctaactccgcccatcccgcccctaactccgcccagttccgcccattctccgccccatggctgactaattttttttatttatgcagaggccgaggccgcctctgcctctgagctattccagaagtagtgaggaggcttttttggaggcctaggcttttgcaaaaagctcccgggagcttgtatatccattttcggatctgatcagcacgtgttgacaattaatcatcggcatagtatatcggcatagtataatacgacaaggtgaggaactaaaccatggccaagttgaccagtgccgttccggtgctcaccgcgcgcgacgtcgccggagcggtcgagttctggaccgaccggctcgggttctcccgggacttcgtggaggacgacttcgccggtgtggtccgggacgacgtgaccctgttcatcagcgcggtccaggaccaggtggtgccggacaacaccctggcctgggtgtgggtgcgcggcctggacgagctgtacgccgagtggtcggaggtcgtgtccacgaacttccgggacgcctccgggccggccatgaccgagatcggcgagcagccgtgggggcgggagttcgccctgcgcgacccggccggcaactgcgtgcacttcgtggccgaggagcaggactgacacgtgctacgagatttcgattccaccgccgccttctatgaaaggttgggcttcggaatcgttttccgggacgccggctggatgatcctccagcgcggggatctcatgctggagttcttcgcccaccccaacttgtttattgcagcttataatggttacaaataaagcaatagcatcacaaatttcacaaataaagcatttttttcactgcattctagttgtggtttgtccaaactcatcaatgtatcttatcatgtctgtataccgtcgacctctagctagagcttggcgtaatcatggtcatagctgtttcctgtgtgaaattgttatccgctcacaattccacacaacatacgagccggaagcataaagtgtaaagcctggggtgcctaatgagtgagctaactcacattaattgcgttgcgctcactgcccgctttccagtcgggaaacctgtcgtgccagctgcattaatgaatcggccaacgcgcggggagaggcggtttgcgtattgggcgctcttccgcttcctcgctcactgactcgctgcgctcggtcgttcggctgcggcgagcggtatcagctcactcaaaggcggtaatacggttatccacagaatcaggggataacgcaggaaagaacatgtgagcaaaaggccagcaaaaggccaggaaccgtaaaaaggccgcgttgctggcgtttttccataggctccgcccccctgacgagcatcacaaaaatcgacgctcaagtcagaggtggcgaaacccgacaggactataaagataccaggcgtttccccctggaagctccctcgtgcgctctcctgttccgaccctgccgcttaccggatacctgtccgcctttctcccttcgggaagcgtggcgctttctcatagctcacgctgtaggtatctcagttcggtgtaggtcgttcgctccaagctgggctgtgtgcacgaaccccccgttcagcccgaccgctgcgccttatccggtaactatcgtcttgagtccaacccggtaagacacgacttatcgccactggcagcagccactggtaacaggattagcagagcgaggtatgtaggcggtgctacagagttcttgaagtggtggcctaactacggctacactagaagaacagtatttggtatctgcgctctgctgaagccagttaccttcggaaaaagagttggtagctcttgatccggcaaacaaaccaccgctggtagcggtggtttttttgtttgcaagcagcagattacgcgcagaaaaaaaggatctcaagaagatcctttgatcttttctacggggtctgacgctcagtggaacgaaaactcacgttaagggattttggtcatgagattatcaaaaaggatcttcacctagatccttttaaattaaaaatgaagttttaaatcaatctaaagtatatatgagtaaacttggtctgacagttaccaatgcttaatcagtgaggcacctatctcagcgatctgtctatttcgttcatccatagttgcctgactccccgtcgtgtagataactacgatacgggagggcttaccatctggccccagtgctgcaatgataccgcgagacccacgctcaccggctccagatttatcagcaataaaccagccagccggaagggccgagcgcagaagtggtcctgcaactttatccgcctccatccagtctattaattgttgccgggaagctagagtaagtagttcgccagttaatagtttgcgcaacgttgttgccattgctacaggcatcgtggtgtcacgctcgtcgtttggtatggcttcattcagctccggttcccaacgatcaaggcgagttacatgatcccccatgttgtgcaaaaaagcggttagctccttcggtcctccgatcgttgtcagaagtaagttggccgcagtgttatcactcatggttatggcagcactgcataattctcttactgtcatgccatccgtaagatgcttttctgtgactggtgagtactcaaccaagtcattctgagaatagtgtatgcggcgaccgagttgctcttgcccggcgtcaatacgggataataccgcgccacatagcagaactttaaaagtgctcatcattggaaaacgttcttcggggcgaaaactctcaaggatcttaccgctgttgagatccagttcgatgtaacccactcgtgcacccaactgatcttcagcatcttttactttcaccagcgtttctgggtgagcaaaaacaggaaggcaaaatgccgcaaaaaagggaataagggcgacacggaaatgttgaatactcatactcttcctttttcaatattattgaagcatttatcagggttattgtctcatgagcggatacatatttgaatgtatttagaaaaataaacaaataggggttccgcgcacatttccccgaaaagtgccacctgacgtcgacggatcgggagatctcccgatcccctatggtgcactctcagtacaatctgctctgatgccgcatagttaagccagtatctgctccctgcttgtgtgttggaggtcgctgagtagtgcgcgagcaaaatttaagctacaacaaggcaaggcttgaccgacaattgcatgaagaatctgcttagggttaggcgttttgcgctgcttcgcgatgtacgggccagatatacgcgttgacattgattattgactagttattaatagtaatcaattacggggtcattagttcatagcccatatatggagttccgcgttacataacttacggtaaatggcccgcctggctgaccgcccaacgacccccgcccattgacgtcaataatgacgtatgttcccatagtaacgccaatagggactttccattgacgtcaatgggtggagtatttacggtaaactgcccacttggcagtacatcaagtgtatcatatgccaagtacgccccctattgacgtcaatgacggtaaatggcccgcctggcattatgcccagtacatgaccttatgggactttcctacttggcagtacatctacgtattagtcatcgctattaccatgg

SEQ ID NO: 360 - DNA, 3372 bp, Homo sapiens
atggcacctccaagtgaagagacgcccctgatccctcagcgttcatgcagcctcttgtccacggaggctggtgccctgcatgtgctgctgcccgctcggggccccgggcccccccagcgcctatctttctcctttggggaccacttggctgaggacctgtgcgtgcaggctgccaaggccagcggcatcctgcctgtgtaccactccctctttgctctggccacggaggacctgtcctgctggttccccccgagccacatcttctccgtggaggatgccagcacccaagtcctgctgtacaggattcgcttttacttccccaattggtttgggctggagaagtgccaccgcttcgggctacgcaaggatttggccagtgctatccttgacctgccagtcctggagcacctctttgcccagcaccgcagtgacctggtgagtgggcgcctccccgtgggcctcagtctcaaggagcagggtgagtgtctcagcctggccgtgttggacctggcccggatggcgcgagagcaggcccagcggccgggagagctgctgaagactgtcagctacaaggcctgcctacccccaagcctgcgcgacctgatccagggcctgagcttcgtgacgcggaggcgtattcggaggacggtgcgcagagccctgcgccgcgtggccgcctgccaggcagaccggcactcgctcatggccaagtacatcatggacctggagcggctggatccagccggggccgccgagaccttccacgtgggcctccctggggcccttggtggccacgacgggctggggctgctccgcgtggctggtgacggcggcatcgcctggacccagggagaacaggaggtcctccagcccttctgcgactttccagaaatcgtagacattagcatcaagcaggccccgcgcgttggcccggccggagagcaccgcctggtcactgttaccaggacagacaaccagattttagaggccgagttcccagggctgcccgaggctctgtcgttcgtggcgctcgtggacggctacttccggctgaccacggactcccagcacttcttctgcaaggaggtggcaccgccgaggctgctggaggaagtggccgagcagtgccacggccccatcactctggactttgccatcaacaagctcaagactgggggctcacgtcctggctcctatgttctccgccgcagcccccaggactttgacagcttcctcctcactgtctgtgtccagaacccccttggtcctgattataagggctgcctcatccggcgcagccccacaggaaccttccttctggttggcctcagccgaccccacagcagtcttcgagagctcctggcaacctgctgggatggggggctgcacgtagatggggtggcagtgaccctcacttcctgctgtatccccagacccaaagaaaagtccaacctgatcgtggtccagagaggtcacagcccacccacatcatccttggttcagccccaatcccaataccagctgagtcagatgacatttcacaagatccctgctgacagcctggagtggcatgagaacctgggccatgggtccttcaccaagatttaccggggctgtcgccatgaggtggtggatggggaggcccgaaagacagaggtgctgctgaaggtcatggatgccaagcacaagaactgcatggagtcattcctggaagcagcgagcttgatgagccaagtgtcgtaccggcatctcgtgctgctccacggcgtgtgcatggctggagacagcaccatggtgcaggaatttgtacacctgggggccatagacatgtatctgcgaaaacgtggccacctggtgccagccagctggaagctgcaggtggtcaaacagctggcctacgccctcaactatctggaggacaaaggcctgccccatggcaatgtctctgcccggaaggtgctcctggctcgggagggggctgatgggagcccgcccttcatcaagctgagtgaccctggggtcagccccgctgtgttaagcctggagatgctcaccgacaggatcccctgggtggcccccgagtgtctccgggaggcgcagacacttagcttggaagctgacaagtggggcttcggcgccacggtctgggaagtgtttagtggcgtcaccatgcccatcagtgccctggatcctgctaagaaactccaattttatgaggaccggcagcagctgccggcccccaagtggacagagctggccctgctgattcaacagtgcatggcctatgagccggtccagaggccctccttccgagccgtcattcgtgacctcaatagcctcatctcttcagactatgagctcctctcagaccccacacctggtgccctggcacctcgtgatgggctgtggaatggtgcccagctctatgcctgccaagaccccacgatcttcgaggagagacacctcaagtacatctcacagctgggcaagggcaactttggcagcgtggagctgtgccgctatgacccgctaggcgacaatacaggtgccctggtggccgtgaaacagctgcagcacagcgggccagaccagcagagggactttcagcgggagattcagatcctcaaagcactgcacagtgatttcattgtcaagtatcgtggtgtcagctatggcccgggccgccagagcctgcggctggtcatggagtacctgcccagcggctgcttgcgcgacttcctgcagcggcaccgcgcgcgcctcgatgccagccgcctccttctctattcctcgcagatctgcaagggcatggagtacctgggctcccgccgctgcgtgcaccgcgacctggccgcccgaaacatcctcgtggagagcgaggcacacgtcaagatcgctgacttcggcctagctaagctgctgccgcttgacaaagactactacgtggtccgcgagccaggccagagccccattttctggtatgcccccgaatccctctcggacaacatcttctctcgccagtcagacgtctggagcttcggggtcgtcctgtacgagctcttcacctactgcgacaaaagctgcagcccctcggccgagttcctgcggatgatgggatgtgagcgggatgtccccgccctctgccgcctcttggaactgctggaggagggccagaggctgccggcgcctcctgcctgccctgctgaggttcacgagctcatgaagctgtgctgggcccctagcccacaggaccggccatcattcagcgccctgggcccccagctggacatgctgtggagcggaagccgggggtgtgagactcatgccttcactgctcacccagagggcaaacaccactccctgtccttttca

SEQ ID NO: 361 - DNA, 3372 bp, Homo sapiens
atggcacctccaagtgaagagacgcccctgatccctcagcgttcatgcagcctcttgtccacggaggctggtgccctgcatgtgctgctgcccgctcggggccccgggcccccccagcgcctatctttctcctttggggaccacttggctgaggacctgtgcgtgcaggctgccaaggccagcggcatcctgcctgtgtaccactccctctttgctctggccacggaggacctgtcctgctggttccccccgagccacatcttctccgtggaggatgccagcacccaagtcctgctgtacaggattcgcttttacttccccaattggtttgggctggagaagtgccaccgcttcgggctacgcaaggatttggccagtgctatccttgacctgccagtcctggagcacctctttgcccagcaccgcagtgacctggtgagtgggcgcctccccgtgggcctcagtctcaaggagcagggtgagtgtctcagcctggccgtgttggacctggcccggatggcgcgagagcaggcccagcggccgggagagctgctgaagactgtcagctacaaggcctgcctacccccaagcctgcgcgacctgatccagggcctgagcttcgtgacgcggaggcgtattcggaggacggtgcgcagagccctgcgccgcgtggccgcctgccaggcagaccggcactcgctcatggccaagtacatcatggacctggagcggctggatccagccggggccgccgagaccttccacgtgggcctccctggggcccttggtggccacgacgggctggggctgctccgcgtggctggtgacggcggcatcgcctggacccagggagaacaggaggtcctccagcccttctgcgactttccagaaatcgtagacattagcatcaagcaggccccgcgcgttggcccggccggagagcaccgcctggtcactgttaccaggacagacaaccagattttagaggccgagttcccagggctgcccgaggctctgtcgttcgtggcgctcgtggacggctacttccggctgaccacggactcccagcacttcttctgcaaggaggtggcaccgccgaggctgctggaggaagtggccgagcagtgccacggccccatcactctggactttgccatcaacaagctcaagactgggggctcacgtcctggctcctatgttctccgccgcagcccccaggactttgacagcttcctcctcactgtctgtgtccagaacccccttggtcctgattataagggctgcctcatccggcgcagccccacaggaaccttccttctggttggcctcagccgaccccacagcagtcttcgagagctcctggcaacctgctgggatggggggctgcacgtagatggggtggcagtgaccctcacttcctgctgtatccccagacccaaagaaaagtccaacctgatcgtggtccagagaggtcacagcccacccacatcatccttggttcagccccaatcccaataccagctgagtcagatcacatttcacaagatccctgctgacagcctggagtggcatgagaacctgggccatgggtccttcaccaagatttaccggggctgtcgccatgaggtggtggatggggaggcccgaaagacagaggtgctgctgaaggtcatggatgccaagcacaagaactgcatggagtcattcctggaagcagcgagcttgatgagccaagtgtcgtaccggcatctcgtgctgctccacggcgtgtgcatggctggagacagcaccatggtgcaggaatttgtacacctgggggccatagacatgtatctgcgaaaacgtggccacctggtgccagccagctggaagctgcaggtggtcaaacagctggcctacgccctcaactatctggaggacaaaggcctgccccatggcaatgtctctgcccggaaggtgctcctggctcgggagggggctgatgggagcccgcccttcatcaagctgagtgaccctggggtcagccccgctgtgttaagcctggagatgctcaccgacaggatcccctgggtggcccccgagtgtctccgggaggcgcagacacttagcttggaagctgacaagtggggcttcggcgccacggtctgggaagtgtttagtggcgtcaccatgcccatcagtgccctggatcctgctaagaaactccaattttatgaggaccggcagcagctgccggcccccaagtggacagagctggccctgctgattcaacagtgcatggcctatgagccggtccagaggccctccttccgagccgtcattcgtgacctcaatagcctcatctcttcagactatgagctcctctcagaccccacacctggtgccctggcacctcgtgatgggctgtggaatggtgcccagctctatgcctgccaagaccccacgatcttcgaggagagacacctcaagtacatctcacagctgggcaagggcaactttggcagcgtggagctgtgccgctatgacccgctaggcgacaatacaggtgccctggtggccgtgaaacagctgcagcacagcgggccagaccagcagagggactttcagcgggagattcagatcctcaaagcactgcacagtgatttcattgtcaagtatcgtggtgtcagctatggcccgggccgccagagcctgcggctggtcatggagtacctgcccagcggctgcttgcgcgacttcctgcagcggcaccgcgcgcgcctcgatgccagccgcctccttctctattcctcgcagatctgcaagggcatggagtacctgggctcccgccgctgcgtgcaccgcgacctggccgcccgaaacatcctcgtggagagcgaggcacacgtcaagatcgctgacttcggcctagctaagctgctgccgcttgacaaagactactacgtggtccgcgagccaggccagagccccattttctggtatgcccccgaatccctctcggacaacatcttctctcgccagtcagacgtctggagcttcggggtcgtcctgtacgagctcttcacctactgcgacaaaagctgcagcccctcggccgagttcctgcggatgatgggatgtgagcgggatgtccccgccctctgccgcctcttggaactgctggaggagggccagaggctgccggcgcctcctgcctgccctgctgaggttcacgagctcatgaagctgtgctgggcccctagcccacaggaccggccatcattcagcgccctgggcccccagctggacatgctgtggagcggaagccgggggtgtgagactcatgccttcactgctcacccagagggcaaacaccactccctgtccttttca

SEQ ID NO: 362 - DNA, 3372 bp, Homo sapiens
atggcacctccaagtgaagagacgcccctgatccctcagcgttcatgcagcctcttgtccacggaggctggtgccctgcatgtgctgctgcccgctcggggccccgggcccccccagcgcctatctttctcctttggggaccacttggctgaggacctgtgcgtgcaggctgccaaggccagcggcatcctgcctgtgtaccactccctctttgctctggccacggaggacctgtcctgctggttccccccgagccacatcttctccgtggaggatgccagcacccaagtcctgctgtacaggattcgcttttacttccccaattggtttgggctggagaagtgccaccgcttcgggctacgcaaggatttggccagtgctatccttgacctgccagtcctggagcacctctttgcccagcaccgcagtgacctggtgagtgggcgcctccccgtgggcctcagtctcaaggagcagggtgagtgtctcagcctggccgtgttggacctggcccggatggcgcgagagcaggcccagcggccgggagagctgctgaagactgtcagctacaaggcctgcctacccccaagcctgcgcgacctgatccagggcctgagcttcgtgacgcggaggcgtattcggaggacggtgcgcagagccctgcgccgcgtggccgcctgccaggcagaccggcactcgctcatggccaagtacatcatggacctggagcggctggatccagccggggccgccgagaccttccacgtgggcctccctggggcccttggtggccacgacgggctggggctgctccgcgtggctggtgacggcggcatcgcctggacccagggagaacaggaggtcctccagcccttctgcgactttccagaaatcgtagacattagcatcaagcaggccccgcgcgttggcccggccggagagcaccgcctggtcactgttaccaggacagacaaccagattttagaggccgagttcccagggctgcccgaggctctgtcgttcgtggcgctcgtggacggctacttccggctgaccacggactcccagcacttcttctgcaaggaggtggcaccgccgaggctgctggaggaagtggccgagcagtgccacggccccatcactctggactttgccatcaacaagctcaagactgggggctcacgtcctggctcctatgttctccgccgcagcccccaggactttgacagcttcctcctcactgtctgtgtccagaacccccttggtcctgattataagggctgcctcatccggcgcagccccacaggaaccttccttctggttggcctcagccgaccccacagcagtcttcgagagctcctggcaacctgctgggatggggggctgcacgtagatggggtggcagtgaccctcacttcctgctgtatccccagacccaaagaaaagtccaacctgatcgtggtccagagaggtcacagcccacccacatcatccttggttcagccccaatcccaataccagctgagtcagatgacatttcacaagatccctgctgacagcctggagtggcatgagaacctgggccatgggtccttcaccaagatttaccggggctgtcgccatgaggtggtggatggggaggcccgaaagacagaggtgctgctgaaggtcatggatgccaagcacaagaactgcatggagtcattcctggaagcagtgagcttgatgagccaagtgtcgtaccggcatctcgtgctgctccacggcgtgtgcatggctggagacagcaccatggtgcaggaatttgtacacctgggggccatagacatgtatctgcgaaaacgtggccacctggtgccagccagctggaagctgcaggtggtcaaacagctggcctacgccctcaactatctggaggacaaaggcctgccccatggcaatgtctctgcccggaaggtgctcctggctcgggagggggctgatgggagcccgcccttcatcaagctgagtgaccctggggtcagccccgctgtgttaagcctggagatgctcaccgacaggatcccctgggtggcccccgagtgtctccgggaggcgcagacacttagcttggaagctgacaagtggggcttcggcgccacggtctgggaagtgtttagtggcgtcaccatgcccatcagtgccctggatcctgctaagaaactccaattttatgaggaccggcagcagctgccggcccccaagtggacagagctggccctgctgattcaacagtgcatggcctatgagccggtccagaggccctccttccgagccgtcattcgtgacctcaatagcctcatctcttcagactatgagctcctctcagaccccacacctggtgccctggcacctcgtgatgggctgtggaatggtgcccagctctatgcctgccaagaccccacgatcttcgaggagagacacctcaagtacatctcacagctgggcaagggcaactttggcagcgtggagctgtgccgctatgacccgctaggcgacaatacaggtgccctggtggccgtgaaacagctgcagcacagcgggccagaccagcagagggactttcagcgggagattcagatcctcaaagcactgcacagtgatttcattgtcaagtatcgtggtgtcagctatggcccgggccgccagagcctgcggctggtcatggagtacctgcccagcggctgcttgcgcgacttcctgcagcggcaccgcgcgcgcctcgatgccagccgcctccttctctattcctcgcagatctgcaagggcatggagtacctgggctcccgccgctgcgtgcaccgcgacctggccgcccgaaacatcctcgtggagagcgaggcacacgtcaagatcgctgacttcggcctagctaagctgctgccgcttgacaaagactactacgtggtccgcgagccaggccagagccccattttctggtatgcccccgaatccctctcggacaacatcttctctcgccagtcagacgtctggagcttcggggtcgtcctgtacgagctcttcacctactgcgacaaaagctgcagcccctcggccgagttcctgcggatgatgggatgtgagcgggatgtccccgccctctgccgcctcttggaactgctggaggagggccagaggctgccggcgcctcctgcctgccctgctgaggttcacgagctcatgaagctgtgctgggcccctagcccacaggaccggccatcattcagcgccctgggcccccagctggacatgctgtggagcggaagccgggggtgtgagactcatgccttcactgctcacccagagggcaaacaccactccctgtccttttca

SEQ ID NO: 363 - DNA, 3372 bp, Homo sapiens
atggcacctccaagtgaagagacgcccctgatccctcagcgttcatgcagcctcttgtccacggaggctggtgccctgcatgtgctgctgcccgctcggggccccgggcccccccagcgcctatctttctcctttggggaccacttggctgaggacctgtgcgtgcaggctgccaaggccagcggcatcctgcctgtgtaccactccctctttgctctggccacggaggacctgtcctgctggttccccccgagccacatcttctccgtggaggatgccagcacccaagtcctgctgtacaggattcgcttttacttccccaattggtttgggctggagaagtgccaccgcttcgggctacgcaaggatttggccagtgctatccttgacctgccagtcctggagcacctctttgcccagcaccgcagtgacctggtgagtgggcgcctccccgtgggcctcagtctcaaggagcagggtgagtgtctcagcctggccgtgttggacctggcccggatggcgcgagagcaggcccagcggccgggagagctgctgaagactgtcagctacaaggcctgcctacccccaagcctgcgcgacctgatccagggcctgagcttcgtgacgcggaggcgtattcggaggacggtgcgcagagccctgcgccgcgtggccgcctgccaggcagaccggcactcgctcatggccaagtacatcatggacctggagcggctggatccagccggggccgccgagaccttccacgtgggcctccctggggcccttggtggccacgacgggctggggctgctccgcgtggctggtgacggcggcatcgcctggacccagggagaacaggaggtcctccagcccttctgcgactttccagaaatcgtagacattagcatcaagcaggccccgcgcgttggcccggccggagagcaccgcctggtcactgttaccaggacagacaaccagattttagaggccgagttcccagggctgcccgaggctctgtcgttcgtggcgctcgtggacggctacttccggctgaccacggactcccagcacttcttctgcaaggaggtggcaccgccgaggctgctggaggaagtggccgagcagtgccacggccccatcactctggactttgccatcaacaagctcaagactgggggctcacgtcctggctcctatgttctccgccgcagcccccaggactttgacagcttcctcctcactgtctgtgtccagaacccccttggtcctgattataagggctgcctcatccggcgcagccccacaggaaccttccttctggttggcctcagccgaccccacagcagtcttcgagagctcctggcaacctgctgggatggggggctgcacgtagatggggtggcagtgaccctcacttcctgctgtatccccagacccaaagaaaagtccaacctgatcgtggtccagagaggtcacagcccacccacatcatccttggttcagccccaatcccaataccagctgagtcagatgacatttcacaagatccctgctgacagcctggagtggcatgagaacctgggccatgggtccttcaccaagatttaccggggctgtcgccatgaggtggtggatggggaggcccgaaagacagaggtgctgctgaaggtcatggatgccaagcacaagaactgcatggagtcattcctggaagcagcgagcttgatgagccaagtgtcgtaccggcatctcgtgctgctccacggcgtgtgcatggctggagacagcaccatggtgcaggaatttgtacacctgggggccatagacatgtatctgcgaaaacgtggccacctggtgccagccagctggaagctgcaggtggtcaaacagctggcctacgccctcaactatctggaggacaaaggcctgccccatggcaatgtctctgcccggaaggtgctcctggcttgggagggggctgatgggagcccgcccttcatcaagctgagtgaccctggggtcagccccgctgtgttaagcctggagatgctcaccgacaggatcccctgggtggcccccgagtgtctccgggaggcgcagacacttagcttggaagctgacaagtggggcttcggcgccacggtctgggaagtgtttagtggcgtcaccatgcccatcagtgccctggatcctgctaagaaactccaattttatgaggaccggcagcagctgccggcccccaagtggacagagctggccctgctgattcaacagtgcatggcctatgagccggtccagaggccctccttccgagccgtcattcgtgacctcaatagcctcatctcttcagactatgagctcctctcagaccccacacctggtgccctggcacctcgtgatgggctgtggaatggtgcccagctctatgcctgccaagaccccacgatcttcgaggagagacacctcaagtacatctcacagctgggcaagggcaactttggcagcgtggagctgtgccgctatgacccgctaggcgacaatacaggtgccctggtggccgtgaaacagctgcagcacagcgggccagaccagcagagggactttcagcgggagattcagatcctcaaagcactgcacagtgatttcattgtcaagtatcgtggtgtcagctatggcccgggccgccagagcctgcggctggtcatggagtacctgcccagcggctgcttgcgcgacttcctgcagcggcaccgcgcgcgcctcgatgccagccgcctccttctctattcctcgcagatctgcaagggcatggagtacctgggctcccgccgctgcgtgcaccgcgacctggccgcccgaaacatcctcgtggagagcgaggcacacgtcaagatcgctgacttcggcctagctaagctgctgccgcttgacaaagactactacgtggtccgcgagccaggccagagccccattttctggtatgcccccgaatccctctcggacaacatcttctctcgccagtcagacgtctggagcttcggggtcgtcctgtacgagctcttcacctactgcgacaaaagctgcagcccctcggccgagttcctgcggatgatgggatgtgagcgggatgtccccgccctctgccgcctcttggaactgctggaggagggccagaggctgccggcgcctcctgcctgccctgctgaggttcacgagctcatgaagctgtgctgggcccctagcccacaggaccggccatcattcagcgccctgggcccccagctggacatgctgtggagcggaagccgggggtgtgagactcatgccttcactgctcacccagagggcaaacaccactccctgtccttttca

SEQ ID NO: 364 - DNA, 3372 bp, Homo sapiens
atggcacctccaagtgaagagacgcccctgatccctcagcgttcatgcagcctcttgtccacggaggctggtgccctgcatgtgctgctgcccgctcggggccccgggcccccccagcgcctatctttctcctttggggaccacttggctgaggacctgtgcgtgcaggctgccaaggccagcggcatcctgcctgtgtaccactccctctttgctctggccacggaggacctgtcctgctggttccccccgagccacatcttctccgtggaggatgccagcacccaagtcctgctgtacaggattcgcttttacttccccaattggtttgggctggagaagtgccaccgcttcgggctacgcaaggatttggccagtgctatccttgacctgccagtcctggagcacctctttgcccagcaccgcagtgacctggtgagtgggcgcctccccgtgggcctcagtctcaaggagcagggtgagtgtctcagcctggccgtgttggacctggcccggatggcgcgagagcaggcccagcggccgggagagctgctgaagactgtcagctacaaggcctgcctacccccaagcctgcgcgacctgatccagggcctgagcttcgtgacgcggaggcgtattcggaggacggtgcgcagagccctgcgccgcgtggccgcctgccaggcagaccggcactcgctcatggccaagtacatcatggacctggagcggctggatccagccggggccgccgagaccttccacgtgggcctccctggggcccttggtggccacgacgggctggggctgctccgcgtggctggtgacggcggcatcgcctggacccagggagaacaggaggtcctccagcccttctgcgactttccagaaatcgtagacattagcatcaagcaggccccgcgcgttggcccggccggagagcaccgcctggtcactgttaccaggacagacaaccagattttagaggccgagttcccagggctgcccgaggctctgtcgttcgtggcgctcgtggacggctacttccggctgaccacggactcccagcacttcttctgcaaggaggtggcaccgccgaggctgctggaggaagtggccgagcagtgccacggccccatcactctggactttgccatcaacaagctcaagactgggggctcacgtcctggctcctatgttctccgccgcagcccccaggactttgacagcttcctcctcactgtctgtgtccagaacccccttggtcctgattataagggctgcctcatccggcgcagccccacaggaaccttccttctggttggcctcagccgaccccacagcagtcttcgagagctcctggcaacctgctgggatggggggctgcacgtagatggggtggcagtgaccctcacttcctgctgtatccccagacccaaagaaaagtccaacctgatcgtggtccagagaggtcacagcccacccacatcatccttggttcagccccaatcccaatacccgctgagtcagatgacatttcacaagatccctgctgacagcctggagtggcatgagaacctgggccatgggtccttcaccaagatttaccggggctgtcgccatgaggtggtggatggggaggcccgaaagacagaggtgctgctgaaggtcatggatgccaagcacaagaactgcatggagtcattcctggaagcagcgagcttgatgagccaagtgtcgtaccggcatctcgtgctgctccacggcgtgtgcatggctggagacagcaccatggtgcaggaatttgtacacctgggggccatagacatgtatctgcgaaaacgtggccacctggtgccagccagctggaagctgcaggtggtcaaacagctggcctacgccctcaactatctggaggacaaaggcctgccccatggcaatgtctctgcccggaaggtgctcctggctcgggagggggctgatgggagcccgcccttcatcaagctgagtgaccctggggtcagccccgctgtgttaagcctggagatgctcaccgacaggatcccctgggtggcccccgagtgtctccgggaggcgcagacacttagcttggaagctgacaagtggggcttcggcgccacggtctgggaagtgtttagtggcgtcaccatgcccatcagtgccctggatcctgctaagaaactccaattttatgaggaccggcagcagctgccggcccccaagtggacagagctggccctgctgattcaacagtgcatggcctatgagccggtccagaggccctccttccgagccgtcattcgtgacctcaatagcctcatctcttcagactatgagctcctctcagaccccacacctggtgccctggcacctcgtgatgggctgtggaatggtgcccagctctatgcctgccaagaccccacgatcttcgaggagagacacctcaagtacatctcacagctgggcaagggcaactttggcagcgtggagctgtgccgctatgacccgctaggcgacaatacaggtgccctggtggccgtgaaacagctgcagcacagcgggccagaccagcagagggactttcagcgggagattcagatcctcaaagcactgcacagtgatttcattgtcaagtatcgtggtgtcagctatggcccgggccgccagagcctgcggctggtcatggagtacctgcccagcggctgcttgcgcgacttcctgcagcggcaccgcgcgcgcctcgatgccagccgcctccttctctattcctcgcagatctgcaagggcatggagtacctgggctcccgccgctgcgtgcaccgcgacctggccgcccgaaacatcctcgtggagagcgaggcacacgtcaagatcgctgacttcggcctagctaagctgctgccgcttgacaaagactactacgtggtccgcgagccaggccagagccccattttctggtatgcccccgaatccctctcggacaacatcttctctcgccagtcagacgtctggagcttcggggtcgtcctgtacgagctcttcacctactgcgacaaaagctgcagcccctcggccgagttcctgcggatgatgggatgtgagcgggatgtccccgccctctgccgcctcttggaactgctggaggagggccagaggctgccggcgcctcctgcctgccctgctgaggttcacgagctcatgaagctgtgctgggcccctagcccacaggaccggccatcattcagcgccctgggcccccagctggacatgctgtggagcggaagccgggggtgtgagactcatgccttcactgctcacccagagggcaaacaccactccctgtccttttca

SEQ ID NO: 365 - DNA, 3372 bp, Homo sapiens
atggcacctccaagtgaagagacgcccctgatccctcagcgttcatgcagcctcttgtccacggaggctggtgccctgcatgtgctgctgcccgctcggggccccgggcccccccagcgcctatctttctcctttggggaccacttggctgaggacctgtgcgtgcaggctgccaaggccagcggcatcctgcctgtgtaccactccctctttgctctggccacggaggacctgtcctgctggttccccccgagccacatcttctccgtggaggatgccagcacccaagtcctgctgtacaggattcgcttttacttccccaattggtttgggctggagaagtgccaccgcttcgggctacgcaaggatttggccagtgctatccttgacctgccagtcctggagcacctctttgcccagcaccgcagtgacctggtgagtgggcgcctccccgtgggcctcagtctcaaggagcagggtgagtgtctcagcctggccgtgttggacctggcccggatggcgcgagagcaggcccagcggccgggagagctgctgaagactgtcagctacaaggcctgcctacccccaagcctgcgcgacctgatccagggcctgagcttcgtgacgcggaggcgtattcggaggacggtgcgcagagccctgcgccgcgtggccgcctgccaggcagaccggcactcgctcatggccaagtacatcatggacctggagcggctggatccagccggggccgccgagaccttccacgtgggcctccctggggcccttggtggccacgacgggctggggctgctccgcgtggctggtgacggcggcatcgcctggacccagggagaacaggaggtcctccagcccttctgcgactttccagaaatcgtagacattagcatcaagcaggccccgcgcgttggcccggccggagagcaccgcctggtcactgttaccaggacagacaaccagattttagaggccgagttcccagggctgcccgaggctctgtcgttcgtggcgctcgtggacggctacttccggctgaccacggactcccagcacttcttctgcaaggaggtggcaccgccgaggctgctggaggaagtggccgagcagtgccacggccccatcactctggactttgccatcaacaagctcaagactgggggctcacgtcctggctcctatgttctccgccgcagcccccaggactttgacagcttcctcctcactgtctgtgtccagaacccccttggtcctgattataagggctgcctcatccggcgcagccccacaggaaccttccttctggttggcctcagccgaccccacagcagtcttcgagagctcctggcaacctgctgggatggggggctgcacgtagatggggtggcagtgaccctcacttcctgctgtatccccagacccaaagaaaagtccaacctgatcgtggtccagagaagtcacagcccacccacatcatccttggttcagccccaatcccaataccagctgagtcagatgacatttcacaagatccctgctgacagcctggagtggcatgagaacctgggccatgggtccttcaccaagatttaccggggctgtcgccatgaggtggtggatggggaggcccgaaagacagaggtgctgctgaaggtcatggatgccaagcacaagaactgcatggagtcattcctggaagcagcgagcttgatgagccaagtgtcgtaccggcatctcgtgctgctccacggcgtgtgcatggctggagacagcaccatggtgcaggaatttgtacacctgggggccatagacatgtatctgcgaaaacgtggccacctggtgccagccagctggaagctgcaggtggtcaaacagctggcctacgccctcaactatctggaggacaaaggcctgccccatggcaatgtctctgcccggaaggtgctcctggctcgggagggggctgatgggagcccgcccttcatcaagctgagtgaccctggggtcagccccgctgtgttaagcctggagatgctcaccgacaggatcccctgggtggcccccgagtgtctccgggaggcgcagacacttagcttggaagctgacaagtggggcttcggcgccacggtctgggaagtgtttagtggcgtcaccatgcccatcagtgccctggatcctgctaagaaactccaattttatgaggaccggcagcagctgccggcccccaagtggacagagctggccctgctgattcaacagtgcatggcctatgagccggtccagaggccctccttccgagccgtcattcgtgacctcaatagcctcatctcttcagactatgagctcctctcagaccccacacctggtgccctggcacctcgtgatgggctgtggaatggtgcccagctctatgcctgccaagaccccacgatcttcgaggagagacacctcaagtacatctcacagctgggcaagggcaactttggcagcgtggagctgtgccgctatgacccgctaggcgacaatacaggtgccctggtggccgtgaaacagctgcagcacagcgggccagaccagcagagggactttcagcgggagattcagatcctcaaagcactgcacagtgatttcattgtcaagtatcgtggtgtcagctatggcccgggccgccagagcctgcggctggtcatggagtacctgcccagcggctgcttgcgcgacttcctgcagcggcaccgcgcgcgcctcgatgccagccgcctccttctctattcctcgcagatctgcaagggcatggagtacctgggctcccgccgctgcgtgcaccgcgacctggccgcccgaaacatcctcgtggagagcgaggcacacgtcaagatcgctgacttcggcctagctaagctgctgccgcttgacaaagactactacgtggtccgcgagccaggccagagccccattttctggtatgcccccgaatccctctcggacaacatcttctctcgccagtcagacgtctggagcttcggggtcgtcctgtacgagctcttcacctactgcgacaaaagctgcagcccctcggccgagttcctgcggatgatgggatgtgagcgggatgtccccgccctctgccgcctcttggaactgctggaggagggccagaggctgccggcgcctcctgcctgccctgctgaggttcacgagctcatgaagctgtgctgggcccctagcccacaggaccggccatcattcagcgccctgggcccccagctggacatgctgtggagcggaagccgggggtgtgagactcatgccttcactgctcacccagagggcaaacaccactccctgtccttttca

SEQ ID NO: 366 - DNA, 3372 bp, Homo sapiens
atggcacctccaagtgaagagacgcccctgatccctcagcgttcatgcagcctcttgtccacggaggctggtgccctgcatgtgctgctgcccgctcggggccccgggcccccccagcgcctatctttctcctttggggaccacttggctgaggacctgtgcgtgcaggctgccaaggccagcggcatcctgcctgtgtaccactccctctttgctctggccacggaggacctgtcctgctggttccccccgagccacatcttctccgtggaggatgccagcacccaagtcctgctgtacaggattcgcttttacttccccaattggtttgggctggagaagtgccaccgcttcgggctacgcaaggatttggccagtgctatccttgacctgccagtcctggagcacctctttgcccagcaccgcagtgacctggtgagtgggcgcctccccgtgggcctcagtctcaaggagcagggtgagtgtctcagcctggccgtgttggacctggcccggatggcgcgagagcaggcccagcggccgggagagctgctgaagactgtcagctacaaggcctgcctacccccaagcctgcgcgacctgatccagggcctgagcttcgtgacgcggaggcgtattcggaggacggtgcgcagagccctgcgccgcgtggccgcctgccaggcagaccggcactcgctcatggccaagtacatcatggacctggagcggctggatccagccggggccgccgagaccttccacgtgggcctccctggggcccttggtggccacgacgggctggggctgctccgcgtggctggtgacggcggcatcgcctggacccagggagaacaggaggtcctccagcccttctgcgactttccagaaatcgtagacattagcatcaagcaggccccgcgcgttggcccggccggagagcaccgcctggtcactgttaccaggacagacaaccagattttagaggccgagttcccagggctgcccgaggctctgtcgttcgtggcgctcgtggacggctacttccggctgaccacggactcccagcacttcttctgcaaggaggtggcaccgccgaggctgctggaggaagtggccgagcagtgccacggccccatcactctggactttgccatcaacaagctcaagactgggggctcacgtcctggctcctatgttctccgccgcagcccccaggactttgacagcttcctcctcactgtctgtgtccagaacccccttggtcctgattataagggctgcctcatccggcgcagccccacaggaaccttccttctggttggcctcagccgaccccacagcagtcttcgagagctcctggcaacctgctgggatggggggctgcacgtagatggggtggcagtgaccctcacttcctgctgtatccccagacccaaagaaaagtccaacctgatcgtggtccagagaggtcacagcccacccacatcatccttggttcagccccaatcccaataccagctgagtcagatgacatttcacaagatccctgctgacagcctggagtggcatgagaacctgggccatgggtccttcaccaagatttaccggggctgtcgccatgaggtggtggatggggaggcccgaaagacagaggtgctgctgaaggtcatggatgccaagcacaagaactgcatggagtcattcctggaagcagcgagcttgatgagccaagtgtcgtaccggcatctcgtgctgctccacggcgtgtgcatggctggagacagcaccatggtgcaggaatttgtacacctgggggccatagacatgtatctgcgaaaacgtggccacctggtgccagccagctggaagctgcaggtggtcaaacagctggcctacgccctcaactatctggaggacaaaggcctgccccatggcaatgtctctgcccggaaggtgctcctggctcgggagggggctgatgggagcccgcccttcatcaagctgagtgaccctggggccagccccgctgtgttaagcctggagatgctcaccgacaggatcccctgggtggcccccgagtgtctccgggaggcgcagacacttagcttggaagctgacaagtggggcttcggcgccacggtctgggaagtgtttagtggcgtcaccatgcccatcagtgccctggatcctgctaagaaactccaattttatgaggaccggcagcagctgccggcccccaagtggacagagctggccctgctgattcaacagtgcatggcctatgagccggtccagaggccctccttccgagccgtcattcgtgacctcaatagcctcatctcttcagactatgagctcctctcagaccccacacctggtgccctggcacctcgtgatgggctgtggaatggtgcccagctctatgcctgccaagaccccacgatcttcgaggagagacacctcaagtacatctcacagctgggcaagggcaactttggcagcgtggagctgtgccgctatgacccgctaggcgacaatacaggtgccctggtggccgtgaaacagctgcagcacagcgggccagaccagcagagggactttcagcgggagattcagatcctcaaagcactgcacagtgatttcattgtcaagtatcgtggtgtcagctatggcccgggccgccagagcctgcggctggtcatggagtacctgcccagcggctgcttgcgcgacttcctgcagcggcaccgcgcgcgcctcgatgccagccgcctccttctctattcctcgcagatctgcaagggcatggagtacctgggctcccgccgctgcgtgcaccgcgacctggccgcccgaaacatcctcgtggagagcgaggcacacgtcaagatcgctgacttcggcctagctaagctgctgccgcttgacaaagactactacgtggtccgcgagccaggccagagccccattttctggtatgcccccgaatccctctcggacaacatcttctctcgccagtcagacgtctggagcttcggggtcgtcctgtacgagctcttcacctactgcgacaaaagctgcagcccctcggccgagttcctgcggatgatgggatgtgagcgggatgtccccgccctctgccgcctcttggaactgctggaggagggccagaggctgccggcgcctcctgcctgccctgctgaggttcacgagctcatgaagctgtgctgggcccctagcccacaggaccggccatcattcagcgccctgggcccccagctggacatgctgtggagcggaagccgggggtgtgagactcatgccttcactgctcacccagagggcaaacaccactccctgtccttttca

SEQ ID NO: 367 - DNA, 3372 bp, Homo sapiens
atggcacctccaagtgaagagacgcccctgatccctcagcgttcatgcagcctcttgtccacggaggctggtgccctgcatgtgctgctgcccgctcggggccccgggcccccccagcgcctatctttctcctttggggaccacttggctgaggacctgtgcgtgcaggctgccaaggccagcggcatcctgcctgtgtaccactccctctttgctctggccacggaggacctgtcctgctggttccccccgagccacatcttctccgtggaggatgccagcacccaagtcctgctgtacaggattcgcttttacttccccaattggtttgggctggagaagtgccaccgcttcgggctacgcaaggatttggccagtgctatccttgacctgccagtcctggagcacctctttgcccagcaccgcagtgacctggtgagtgggcgcctccccgtgggcctcagtctcaaggagcagggtgagtgtctcagcctggccgtgttggacctggcccggatggcgcgagagcaggcccagcggccgggagagctgctgaagactgtcagctacaaggcctgcctacccccaagcctgcgcgacctgatccagggcctgagcttcgtgacgcggaggcgtattcggaggacggtgcgcagagccctgcgccgcgtggccgcctgccaggcagaccggcactcgctcatggccaagtacatcatggacctggagcggctggatccagccggggccgccgagaccttccacgtgggcctccctggggcccttggtggccacgacgggctggggctgctccgcgtggctggtgacggcggcatcgcctggacccagggagaacaggaggtcctccagcccttctgcgactttccagaaatcgtagacattagcatcaagcaggccccgcgcgttggcccggccggagagcaccgcctggtcactgttaccaggacagacaaccagattttagaggccgagttcccagggctgcccgaggctctgtcgttcgtggcgctcgtggacggctacttccggctgaccacggactcccagcacttcttctgcaaggaggtggcaccgccgaggctgctggaggaagtggccgagcagtgccacggccccatcactctggactttgccatcaacaagctcaagactgggggctcacgtcctggctcctatgttctccgccgcagcccccaggactttgacagcttcctcctcactgtctgtgtccagaacccccttggtcctgattataagggctgcctcatccggcgcagccccacaggaaccttccttctggttggcctcagccgaccccacagcagtcttcgagagctcctggcaacctgctgggatggggggctgcacgtagatggggtggcagtgaccctcacttcctgctgtatccccagacccaaagaaaagtccaacctgatcgtggtccagagaggtcacagcccacccacatcatccttggttcagccccaatcccaataccagctgagtcagatgacatttcacaagatccctgctgacagcctggagtggcatgagaacctgggccatgggtccttcaccaagatttaccggggctgtcgccatgaggtggtggatggggaggcccgaaagacagaggtgctgctgaaggtcatggatgccaagcacaagaactgcatggagtcattcctggaagcagcgagcttgatgagccaagtgtcgtaccggcatctcgtgctgctccacggcgtgtgcatggctggagacagcaccatggtgcaggaatttgtacacctgggggccatagacatgtatctgcgaaaacgtggccacctggtgccagccagctggaagctgcaggtggtcaaacagctggcctacgccctcaactatctggaggacaaaggcctgccccatggcaatgtctctgcccggaaggtgctcctggctcgggagggggctgatgggagcccgcccttcatcaagctgagtgaccctggggtcagccccgctctgttaagcctggagatgctcaccgacaggatcccctgggtggcccccgagtgtctccgggaggcgcagacacttagcttggaagctgacaagtggggcttcggcgccacggtctgggaagtgtttagtggcgtcaccatgcccatcagtgccctggatcctgctaagaaactccaattttatgaggaccggcagcagctgccggcccccaagtggacagagctggccctgctgattcaacagtgcatggcctatgagccggtccagaggccctccttccgagccgtcattcgtgacctcaatagcctcatctcttcagactatgagctcctctcagaccccacacctggtgccctggcacctcgtgatgggctgtggaatggtgcccagctctatgcctgccaagaccccacgatcttcgaggagagacacctcaagtacatctcacagctgggcaagggcaactttggcagcgtggagctgtgccgctatgacccgctaggcgacaatacaggtgccctggtggccgtgaaacagctgcagcacagcgggccagaccagcagagggactttcagcgggagattcagatcctcaaagcactgcacagtgatttcattgtcaagtatcgtggtgtcagctatggcccgggccgccagagcctgcggctggtcatggagtacctgcccagcggctgcttgcgcgacttcctgcagcggcaccgcgcgcgcctcgatgccagccgcctccttctctattcctcgcagatctgcaagggcatggagtacctgggctcccgccgctgcgtgcaccgcgacctggccgcccgaaacatcctcgtggagagcgaggcacacgtcaagatcgctgacttcggcctagctaagctgctgccgcttgacaaagactactacgtggtccgcgagccaggccagagccccattttctggtatgcccccgaatccctctcggacaacatcttctctcgccagtcagacgtctggagcttcggggtcgtcctgtacgagctcttcacctactgcgacaaaagctgcagcccctcggccgagttcctgcggatgatgggatgtgagcgggatgtccccgccctctgccgcctcttggaactgctggaggagggccagaggctgccggcgcctcctgcctgccctgctgaggttcacgagctcatgaagctgtgctgggcccctagcccacaggaccggccatcattcagcgccctgggcccccagctggacatgctgtggagcggaagccgggggtgtgagactcatgccttcactgctcacccagagggcaaacaccactccctgtccttttca

SEQ ID NO: 368 - DNA, 2358 bp, Homo sapiens
atggctatgtggatacaggctcagcagctccagggcgatgcccttcaccagatgcaggccttgtacggccagcatttccccatcgaggtgcgacattatttatcacagtggatcgaaagccaagcctgggactcaatagatcttgataatccacaggagaacattaaggccacccagctcctggagggcctggtgcaggagctgcagaagaaggcggagcaccaggtgggggaagatgggtttttgctgaagatcaagctggggcactatgccacacagctccagagcacgtacgaccgctgccccatggagctggttcgctgtatccggcacattctgtacaacgaacagaggctggttcgcgaagccaacaacggcagctctccagctggaagtcttgctgacgccatgtcccagaagcaccttcagatcaaccaaacgtttgaggagctgcgcctgatcacacaggacacggagaacgagctgaagaagctgcagcagacccaagagtacttcatcatccagtaccaggagagcctgcggatccaagctcagtttgcccagctgggacagctgaacccccaggagcgcatgagcagggagacggccctccagcagaagcaagtgtccctggagacctggctgcagcgagaggcacagacactgcagcagtaccgagtggagctggctgagaagcaccagaagaccctgcagctgctgcggaagcagcagaccatcatcctggacgacgagctgatccagtggaagcggagacagcagctggccgggaacgggggtccccccgagggcagcctggacgtgctgcagtcctggtgtgagaagctggccgagatcatctggcagaaccggcagcagatccgcagggctgagcacttgtgccagcagctgcccatcccaggccccgtggaggagatgctggctgaggtcaacgccaccatcacggacatcatctcagccctggtcaccagcacgttcatcatcgagaagcagcctcctcaggtcctgaagacccagaccaagtttgcagccaccgtgcgcctgctggtgggggggaagctgaatgtgcacatgaaccccccgcaggtgaaggcgaccatcatcagcgagcagcaggccaagtccctgctcaagaatgagaacacccgcaatgattacagcggcgagatcctgaacaactgttgcgtcatggagtaccaccaggccactggcacactcagcgcccacttcagaaacatgtccctgaaacgaatcaagaggtctgaccgccgtggggcagagtcagtaacggaagagaagttcacgatcctgtttgactcacagttcagcgtcggtggaaacgagctggtctttcaagtcaagaccttgtcgctcccggtggtggtgattgttcacggcagccaggacaacaatgccacagccactgtcctctgggacaacgcctttgcagagcctggcagggtgccatttgccgtgcctgacaaggtgctgtggccgcagctgtgtgaagcgctcaacatgaaattcaaggctgaagtacagagcaaccggggcttgaccaaggagaacctcgtgttcctggcacagaaactgttcaacatcagcagcaaccacctcgaggactacaacagcatgtccgtgtcctggtcccagttcaaccgggagaatttgccaggacggaattacactttctggcagtggtttgatggcgtgatggaagtattgaaaaaacatctcaagcctcactggaatgatggggctatcctgggtttcgtgaacaagcaacaggcccacgacctgctcatcaacaagccagacgggaccttcctgctgcgcttcagcgactcggaaatcgggggcatcaccattgcttggaagtttgactctcaggagagaatgttttggaatctgatgccttttaccactagagacttctctatccggtccctcgctgaccgcctgggggacctgaattacctcatatatgtgtttcctgatcggccaaaggatgaagtatattctaagtactacacaccggtcccctgtgagcccgcaactgcgaaagcagctgacggatacgtgaagccacagatcaagcaggtggtccccgagtttgcaaatgcatccacagatgctgggagtggcgccacctacatggatcaggctccttccccagtcgtgtgccctcaggctcactacaacatgtacccacccaacccggactccgtccttgataccgatggggacttcgatctggaagacacgatggacgtggcgcggcgcgtggaagagctcttaggccggcccatggacagtcagtggatccctcacgcacagtca

SEQ ID NO: 369 - DNA, 2358 bp, Homo sapiens
atggctatgtggatacaggctcagcagctccagggcgatgcccttcaccagatgcaggccttgtacggccagcatttccccatcgaggtgcgacattatttatcacagtggatcgaaagccaagcctgggactcaatagatcttgataatccacaggagaacattaaggccacccagctcctggagggcctggtgcaggagctgcagaagaaggcggagcaccaggtgggggaagatgggtttttgctgaagatcaagctggggcactatgccacacagctccagagcacgtacgaccgctgccccatggagctggttcgctgtatccggcacattctgtacaacgaacagaggctggttcgcgaagccaacaacggcagctctccagctggaagtcttgctgacgccatgtcccagaagcaccttcagatcaaccaaacgtttgaggagctgcgcctgatcacacaggacacggagaacgagctgaagaagctgcagcagacccaagagtacttcatcatccagtaccaggagagcctgcggatccaagctcagtttgcccagctgggacagctgaacccccaggagcgcatgagcagggagacggccctccagcagaagcaagtgtccctggagacctggctgcagcgagaggcacagacactgcagcagtaccgagtggagctggctgagaagcaccagaagaccctgcagctgctgcggaagcagcagaccatcatcctggacgacgagctgatccagtggaagcggagacagcagctggccgggaacgggggtccccccgagggcagcctggacgtgctgcagtcctggtgtgagaagctggccgagatcatctggcagaaccggcagcagatccgcagggctgagcacttgtgccagcagctgcccatcccaggccccgtggaggagatgctggctgaggtcaacgccaccatcacggacatcatctcagccctggtcaccagcacgttcatcatcgagaagcagcctcctcaggtcctgaagacccagaccaagtttgcagccaccgtgcgcctgctggtgggggggaagctgaatgtgcacatgaaccccccgcaggtgaaggcgaccatcatcagcgagcagcaggccaagtccctgctcaagaatgagaacacccgcaatgattacagcggcgagatcctgaacaactgttgcgtcatggagtaccaccaggccactggcacactcagcgcccacttcagaaacatgtccctgaaacgaatcaagaggtctgaccgccgtggggcagagtcagtaacggaagagaagttcacgatcctgtttgactcacagttcagcgtcggtggaaacgagctggtctttcaagtcaagaccttgtcgctcccggtggtggtgattgttcacggcagccaggacaacaatgccacagccactgtcctctgggacaacgcctttgcagagcctggcagggtgccatttgccgtgcctgacaaggtgctgtggccgcagctgtgtgaagcgctcaacatgaaattcaaggctgaagtacagagcaaccggggcttgaccaaggagaacctcgtgttcctggcacagaaactgttcaacatcagcagcaaccacctcgaggactacaacagcatgtccgtgtcctggtcccagttcaaccgggagaatttgccaggacggaattacactttctggcagtggtttgatggcgtgatggaagtattgaaaaaacatctcaagcctcactggaatgatggggctatcctgggtttcgtgaacaagcaacaggcccacgacctgctcatcaacaagccagacgggaccttcctgctgcgcttcagcgactcggaaatcgggggcatcagcattgcttggaagtttgactctcaggagagaatgttttggaatctgatgccttttaccactagagacttctctatccggtccctcgctgaccgcctgggggacctgaattacctcatatatgtgtttcctgatcggccaaaggatgaagtatattctaagtactacacaccggtcccctgtgagcccgcaactgcgaaagcagctgacggatacgtgaagccacagatcaagcaggtggtccccgagtttgcaaatgcatccacagatgctgggagtggcgccacctacatggatcaggctccttccccagtcgtgtgccctcaggctcactacaacatgtacccacccaacccggactccgtccttgataccgatggggacttcgatctggaagacacgatggacgtggcgcggcgcgtggaagagctcttaggccggcccatggacagtcagtggatccctcacgcacagtca

SEQ ID NO: 370 - DNA, 2358 bp, Homo sapiens
atggctatgtggatacaggctcagcagctccagggcgatgcccttcaccagatgcaggccttgtacggccagcatttccccatcgaggtgcgacattatttatcacagtggatcgaaagccaagcctgggactcaatagatcttgataatccacaggagaacattaaggccacccagctcctggagggcctggtgcaggagctgcagaagaaggcggagcaccaggtgggggaagatgggtttttgctgaagatcaagctggggcactatgccacacagctccagagcacgtacgaccgctgccccatggagctggttcgctgtatccggcacattctgtacaacgaacagaggctggttcgcgaagccaacaacggcagctctccagctggaagtcttgctgacgccatgtcccagaagcaccttcagatcaaccaaacgtttgaggagctgcgcctgatcacacaggacacggagaacgagctgaagaagctgcagcagacccaagagtacttcatcatccagtaccaggagagcctgcggatccaagctcagtttgcccagctgggacagctgaacccccaggagcgcatgagcagggagacggccctccagcagaagcaagtgtccctggagacctggctgcagcgagaggcacagacactgcagcagtaccgagtggagctggctgagaagcaccagaagaccctgcagctgctgcggaagcagcagaccatcatcctggacgacgagctgatccagtggaagcggagacagcagctggccgggaacgggggtccccccgagggcagcctggacgtgctgcagtcctggtgtgagaagctggccgagatcatctggcagaaccggcagcagatccgcagggctgagcacttgtgccagcagctgcccatcccaggccccgtggaggagatgctggctgaggtcaacgccaccatcacggacatcatctcagccctggtcaccagcacgttcatcatcgagaagcagcctcctcaggtcctgaagacccagaccaagtttgcagccaccgtgcgcctgctggtgggggggaagctgaatgtgcacatgaaccccccgcaggtgaaggcgaccatcatcagcgagcagcaggccaagtccctgctcaagaatgagaacacccgcaatgattacagcggcgagatcctgaacaactgttgcgtcatggagtaccaccaggccactggcacactcagcgcccacttcagaaacatgtccctgaaacgaatcaagaggtctgaccgccgtggggcagagtcagtaacggaagagaagttcacgatcctgtttgactcacagttcagcgtcggtggaaacgagctggtctttcaagtcaagaccttgtcgctcccggtggtggtgattgttcacggcagccaggacaacaatgccacagccactgtcctctgggacaacgcctttgcagagcctggcagggtgccatttgccgtgcctgacaaggtgctgtggccgcagctgtgtgaagcgctcaacatgaaattcaaggctgaagtacagagcaaccggggcttgaccaaggagaacctcgtgttcctggcacagaaactgttcaacatcagcagcaaccacctcgaggactacaacagcatgtccgtgtcctggtcccagttcaaccgggagaatttgccaggacggaattacactttctggcagtggtttgatggcgtgatggaagtattgaaaaaacatctcaagcctcactggaatgatggggctatcctgggtttcgtgaacaagcaacaggcccacgacctgctcatcaacaagccagacgggaccttcctgctgcgcttcagcgactcggaaatcgggggcatcaccattgcttggaagtttgactctcaggagagaatgttttggcatctgatgccttttaccactagagacttctctatccggtccctcgctgaccgcctgggggacctgaattacctcatatatgtgtttcctgatcggccaaaggatgaagtatattctaagtactacacaccggtcccctgtgagcccgcaactgcgaaagcagctgacggatacgtgaagccacagatcaagcaggtggtccccgagtttgcaaatgcatccacagatgctgggagtggcgccacctacatggatcaggctccttccccagtcgtgtgccctcaggctcactacaacatgtacccacccaacccggactccgtccttgataccgatggggacttcgatctggaagacacgatggacgtggcgcggcgcgtggaagagctcttaggccggcccatggacagtcagtggatccctcacgcacagtca

SEQ ID NO: 371 - DNA, 2358 bp, Homo sapiens
atggctatgtggatacaggctcagcagctccagggcgatgcccttcaccagatgcaggccttgtacggccagcatttccccatcgaggtgcgacattatttatcacagtggatcgaaagccaagcctgggactcaatagatcttgataatccacaggagaacattaaggccacccagctcctggagggcctggtgcaggagctgcagaagaaggcggagcaccaggtgggggaagatgggtttttgctgaagatcaagctggggcactatgccacacagctccagagcacgtacgaccgctgccccatggagctggttcgctgtatccggcacattctgtacaacgaacagaggctggttcgcgaagccaacaacggcagctctccagctggaagtcttgctgacgccatgtcccagaagcaccttcagatcaaccaaacgtttgaggagctgcgcctgatcacacaggacacggagaacgagctgaagaagctgcagcagacccaagagtacttcatcatccagtaccaggagagcctgcggatccaagctcagtttgcccagctgggacagctgaacccccaggagcgcatgagcagggagacggccctccagcagaagcaagtgtccctggagacctggctgcagcgagaggcacagacactgcagcagtaccgagtggagctggctgagaagcaccagaagaccctgcagctgctgcggaagcagcagaccatcatcctggacgacgagctgatccagtggaagcggagacagcagctggccgggaacgggggtccccccgagggcagcctggacgtgctgcagtcctggtgtgagaagctggccgagatcatctggcagaaccggcagcagatccgcagggctgagcacttgtgccagcagctgcccatcccaggccccgtggaggagatgctggctgaggtcaacgccaccatcacggacatcatctcagccctggtcaccagcacgttcatcatcgagaagcagcctcctcaggtcctgaagacccagaccaagtttgcagccaccgtgcgcctgctggtgggggggaagctgaatgtgcacatgaaccccccgcaggtgaaggcgaccatcatcagcgagcagcaggccaagtccctgctcaagaatgagaacacccgcaatgattacagcggcgagatcctgaacaactgttgcgtcatggagtaccaccaggccactggcacactcagcgcccacttcagaaacatgtccctgaaacgaatcaagaggtctgaccgccgtggggcagagtcagtaacggaagagaagttcacgatcctgtttgactcacagttcagcgtcggtggaaacgagctggtctttcaagtcaagaccttgtcgctcccggtggtggtgattgttcacggcagccaggacaacaatgccacagccactgtcctctgggacaacgcctttgcagagcctggcagggtgccatttgccgtgcctgacaaggtgctgtggccgcagctgtgtgaagcgctcaacatgaaattcaaggctgaagtacagagcaaccggggcttgaccaaggagaacctcgtgttcctggcacagaaactgttcaacatcagcagcaaccacctcgaggactacaacagcatgtccgtgtcctggtcccagttcaaccgggagaatttgccaggacggaattacactttctggcagtggtttgatggcgtgatggaagtattgaaaaaacatctcaagcctcactggaatgatggggctatcctgggtttcgtgaacaagcaacaggcccacgacctgctcatcaacaagccagacgggaccttcctgctgcgcttcagcgactcggaaatcgggggcatcaccattgcttggaagtttgactctcaggagagaatgttttggaatctgatgccttttaccactagagacttctctatccggtccctcgctgaccgcctgggggacctgaatttcctcatatatgtgtttcctgatcggccaaaggatgaagtatattctaagtactacacaccggtcccctgtgagcccgcaactgcgaaagcagctgacggatacgtgaagccacagatcaagcaggtggtccccgagtttgcaaatgcatccacagatgctgggagtggcgccacctacatggatcaggctccttccccagtcgtgtgccctcaggctcactacaacatgtacccacccaacccggactccgtccttgataccgatggggacttcgatctggaagacacgatggacgtggcgcggcgcgtggaagagctcttaggccggcccatggacagtcagtggatccctcacgcacagtca

SEQ ID NO: 372 - DNA, 2358 bp, Homo sapiens
atggctatgtggatacaggctcagcagctccagggcgatgcccttcaccagatgcaggccttgtacggccagcatttccccatcgaggtgcgacattatttatcacagtggatcgaaagccaagcctgggactcaatagatcttgataatccacaggagaacattaaggccacccagctcctggagggcctggtgcaggagctgcagaagaaggcggagcaccaggtgggggaagatgggtttttgctgaagatcaagctggggcactatgccacacagctccagagcacgtacgaccgctgccccatggagctggttcgctgtatccggcacattctgtacaacgaacagaggctggttcgcgaagccaacaacggcagctctccagctggaagtcttgctgacgccatgtcccagaagcaccttcagatcaaccaaacgtttgaggagctgcgcctgatcacacaggacacggagaacgagctgaagaagctgcagcagacccaagagtacttcatcatccagtaccaggagagcctgcggatccaagctcagtttgcccagctgggacagctgaacccccaggagcgcatgagcagggagacggccctccagcagaagcaagtgtccctggagacctggctgcagcgagaggcacagacactgcagcagtaccgagtggagctggctgagaagcaccagaagaccctgcagctgctgcggaagcagcagaccatcatcctggacgacgagctgatccagtggaagcggagacagcagctggccgggaacgggggtccccccgagggcagcctggacgtgctgcagtcctggtgtgagaagctggccgagatcatctggcagaaccggcagcagatccgcagggctgagcacttgtgccagcagctgcccatcccaggccccgtggaggagatgctggctgaggtcaacgccaccatcacggacatcatctcagccctggtcaccagcacgttcatcatcgagaagcagcctcctcaggtcctgaagacccagaccaagtttgcagccaccgtgcgcctgctggtgggggggaagctgaatgtgcacatgaaccccccgcaggtgaaggcgaccatcatcagcgagcagcaggccaagtccctgctcaagaatgagaacacccgcaatgattacagcggcgagatcctgaacaactgttgcgtcatggagtaccaccaggccactggcacactcagcgcccacttcagaaacatgtccctgaaacgaatcaagaggtctgaccgccgtggggcagagtcagtaacggaagagaagttcacgatcctgtttgactcacagttcagcgtcggtggaaacgagctggtctttcaagtcaagaccttgtcgctcccggtggtggtgattgttcacggcagccaggacaacaatgccacagccactgtcctctgggacaacgcctttgcagagcctggcagggtgccatttgccgtgcctgacaaggtgctgtggccgcagctgtgtgaagcgctcaacatgaaattcaaggctgaagtacagagcaaccggggcttgaccaaggagaacctcgtgttcctggcacagaaactgttcaacatcagcagcaaccacctcgaggactacaacagcatgtccgtgtcctggtcccagttcaaccgggagaatttgccaggacggaattacactttctggcagtggtttgatggcgtgatggaagtattgaaaaaacatctcaagcctcactggaatgatggggctatcctgggtttcgtgaacaagcaacaggcccacgacctgctcatcaacaagccagacgggaccttcctgctgcgcttcagcgactcggaaatcgggggcatcaccattgcttggaagtttgactctcaggagagaatgttttggaatctgatgccttttaccactagagacttctctatccggtccctcgctgaccgcctgggggacctgaattacctcatatatgtgtttcctgatcggccaaaggatgaagtatattctaagtactacacaccggtcccctgtgagcccgcaactgcgaaagcagctgacggatacgtgaagccacagatcaagctggtggtccccgagtttgcaaatgcatccacagatgctgggagtggcgccacctacatggatcaggctccttccccagtcgtgtgccctcaggctcactacaacatgtacccacccaacccggactccgtccttgataccgatggggacttcgatctggaagacacgatggacgtggcgcggcgcgtggaagagctcttaggccggcccatggacagtcagtggatccctcacgcacagtca

SEQ ID NO: 373 - DNA, 2358 bp, Homo sapiens
atggctatgtggatacaggctcagcagctccagggcgatgcccttcaccagatgcaggccttgtacggccagcatttccccatcgaggtgcgacattatttatcacagtggatcgaaagccaagcctgggactcaatagatcttgataatccacaggagaacattaaggccacccagctcctggagggcctggtgcaggagctgcagaagaaggcggagcaccaggtgggggaagatgggtttttgctgaagatcaagctggggcactatgccacacagctccagagcacgtacgaccgctgccccatggagctggttcgctgtatccggcacattctgtacaacgaacagaggctggttcgcgaagccaacaacggcagctctccagctggaagtcttgctgacgccatgtcccagaagcaccttcagatcaaccaaacgtttgaggagctgcgcctgatcacacaggacacggagaacgagctgaagaagctgcagcagacccaagagtacttcatcatccagtaccaggagagcctgcggatccaagctcagtttgcccagctgggacagctgaacccccaggagcgcatgagcagggagacggccctccagcagaagcaagtgtccctggagacctggctgcagcgagaggcacagacactgcagcagtaccgagtggagctggctgagaagcaccagaagaccctgcagctgctgcggaagcagcagaccatcatcctggacgacgagctgatccagtggaagcggagacagcagctggccgggaacgggggtccccccgagggcagcctggacgtgctgcagtcctggtgtgagaagctggccgagatcatctggcagaaccggcagcagatccgcagggctgagcacttgtgccagcagctgcccatcccaggccccgtggaggagatgctggctgaggtcaacgccaccatcacggacatcatctcagccctggtcaccagcacgttcatcatcgagaagcagcctcctcaggtcctgaagacccagaccaagtttgcagccaccgtgcgcctgctggtgggggggaagctgaatgtgcacatgaaccccccgcaggtgaaggcgaccatcatcagcgagcagcaggccaagtccctgctcaagaatgagaacacccgcaatgattacagcggcgagatcctgaacaactgttgcgtcatggagtaccaccaggccactggcacactcagcgcccacttcagaaacatgtccctgaaacgaatcaagaggtctgaccgccgtggggcagagtcagtaacggaagagaagttcacgatcctgtttgactcacagttcagcgtcggtggaaacgagctggtctttcaagtcaagaccttgtcgctcccggtggtggtgattgttcacggcagccaggacaacaatgccacagccactgtcctctgggacaacgcctttgcagagcctggcagggtgccatttgccgtgcctgacaaggtgctgtggccgcagctgtgtgaagcgctcaacatgaaattcaaggctgaagtacagagcaaccggggcttgaccaaggagaacctcgtgttcctggcacagaaactgttcaacatcagcagcaaccacctcgaggactacaacagcatgtccgtgtcctggtcccagttcaaccgggagaatttgccaggacggaattacactttctggcagtggtttgatggcgtgatggaagtattgaaaaaacatctcaagcctcactggaatgatggggctatcctgggtttcgtgaacaagcaacaggcccacgacctgctcatcaacaagccagacgggaccttcctgctgcgcttcagcgactcggaaatcgggggcatcaccattgcttggaagtttgactctcaggagagaatgttttggaatctgatgccttttaccactagagacttctctatccggtccctcgctgactgcctgggggacctgaattacctcatatatgtgtttcctgatcggccaaaggatgaagtatattctaagtactacacaccggtcccctgtgagcccgcaactgcgaaagcagctgacggatacgtgaagccacagatcaagcaggtggtccccgagtttgcaaatgcatccacagatgctgggagtggcgccacctacatggatcaggctccttccccagtcgtgtgccctcaggctcactacaacatgtacccacccaacccggactccgtccttgataccgatggggacttcgatctggaagacacgatggacgtggcgcggcgcgtggaagagctcttaggccggcccatggacagtcagtggatccctcacgcacagtca

SEQ ID NO: 374 - DNA, 3462 bp, Homo sapiens
atgcagtatctaaatataaaagaggactgcaatgccatggctttctgtgctaaaatgaggagctccaagaagactgaggtgaacctggaggcccctgagccaggggtggaagtgatcttctatctgtcggacagggagcccctccggctgggcagtggagagtacacagcagaggaactgtgcatcagggctgcacaggcatgccgtatctctcctctttgtcacaacctctttgccctgtatgacgagaacaccaagctctggtatgctccaaatcgcaccatcaccgttgatgacaagatgtccctccggctccactaccggatgaggttctatttcaccaattggcatggaaccaacgacaatgagcagtcagtgtggcgtcattctccaaagaagcagaaaaatggctacgagaaaaaaaagattccagatgcaacccctctccttgatgccagctcactggagtatctgtttgctcagggacagtatgatttggtgaaatgcctggctcctattcgagaccccaagaccgagcaggatggacatgatattgagaacgagtgtctagggatggctgtcctggccatctcacactatgccatgatgaagaagatgcagttgccagaactgcccaaggacatcagctacaagcgatatattccagaaacattgaataagtccatcagacagaggaaccttctcaccaggatgcggataaataatgttttcaaggatttcctaaaggaatttaacaacaagaccatttgtgacagcagcgtgtccacgcatgacctgaaggtgaaatacttggctaccttggaaactttgacaaaacattacggtgctgaaatatttgagacttccatgttactgatttcatcagaaaatgagatgaattggtttcattcgaatgacggtggaaacgttctctactacgaagtgatggtgactgggaatcttggaatccagtggaggcataaaccaaatgttgtttctgttgaaaaggaaaaaaataaactgaagcggaaaaaactggaaaataaacacaagaaggatgaggagaaaaacaagatccgggaagagtggaacaatttttcttacttccctgaaatcactcacattgtaataaaggagtctgtggtcagcattaacaagcaggacaacaagaaaatggaactgaagctctcttcccacgaggaggccttgtcctttgtgtccctggtagatggctacttccggctcacagcagatgcccatcattacctctgcaccgacgtggcccccccgttgatcgtccacaacatacagaatggctgtcatggtccaatctgtacagaatacgccatcaataaattgcggcaagaaggaagcgaggaggggatgtacgtgctgaggtggagctgcaccgactttgacaacatcctcatgaccgtcacctgctttgagaagtctgagcaggtgcagggtgcccagaagcagttcaagaactttcagatcgaggtgcagaagggccgctacagtctgcacggttcggaccgcagcttccccagcttgggagacctcatgagccacctcaagaagcagatcctgcgcacggataacatcagcttcatgctaaaacgctgctgccagcccaagccccgagaaatctccaacctgctggtggctactaagaaagcccaggagtggcagcccgtctaccccatgagccagctgagtttcgatcggatcctcaagaaggatctggtgcagggcgagcaccttgggagaggcacgagaacacacatctattctgggaccctgatggattacaaggatgacgaaggaacttctgaagagaagaagataaaagtgatcctcaaagtcttagaccccagccacagggatatttccctggccttcttcgaggcagccagcatgatgagacaggtctcccacaaacacatcgtgtacctctatggcgtctgtgtccgcgacgtggagaatatcatggtggaagagtttgtggaagggggtcctctggatctcttcatgcaccggaaaagcgatgtccttaccacaccatggaaattcaaagttgccaaacagctggccagtgccctgagctacttggaggataaagacctggtccatggaaatgtgtgtactaaaaacctcctcctggcccgtgagggcatcgacagtgagtgtggcccattcatcaagctcagtgaccccggcatccccattacggtgctgtctaggcaagaatgcattgaacgaatcccatggattgctcctgagtgtgttgaggactccaagaacctgagtgtggctgctgacaagtggagctttggaaccacgctctgggaaatctgctacaatggcgagatccccttgaaagacaagacgctgattgagaaagagagattctatgaaagccggtgcaggccagtgacaccatcatgtaaggagctggctgacctcatgacccgctgcatgaactatgaccccaatcagaggcctttcttccgagccatcatgagagacattaataagcttgaagagcagaatccagatattgtttcagaaaaaaaaccagcaactgaagtggaccccacacattttgaaaagcgcttcctaaagaggatccgtgacttgggagagggccactttgggaaggttgagctctgcaggtatgaccccgaaggggacaatacaggggagcaggtggctgttaaatctctgaagcctgagagtggaggtaaccacatagctgatctgaaaaaggaaatcgagatcttaaggaacctctatcatgagaacattgtgaagtacaaaggaatctgcacagaagacggaggaaatggtattaagctcatcatggaatttctgccttcgggaagccttaaggaatatcttccaaagaataagaacaaaataaacctcaaacagcagctaaaatatgccgttcagatttgtaaggggatggactatttgggttctcggcaatacgttcaccgggacttggcagcaagaaatgtccttgttgagagtgaacaccaagtgaaaattggagacttcggtttaaccaaagcaattgaaaccgataaggagtattacaccgtcaaggatgaccgggacagccctgtgttttggtatgctccagaatgtttaatgcaatctaaattttatattgcctctgacgtctggtcttttggagtcactctgcatgagctgctgacttactgtgattcagattctagtcccatggctttgttcctgaaaatgataggcccaacccatggccagatgacagtcacaagacttgtgaatacgttaaaagaaggaaaacgcctgccgtgcccacctaactgtccagatgaggtttatcaacttatgaggaaatgctgggaattccaaccatccaatcggacaagctttcagaaccttattgaaggatttgaagcacttttaaaa

SEQ ID NO: 375 - DNA, 3462 bp, Homo sapiens
atgcagtatctaaatataaaagaggactgcaatgccatggctttctgtgctaaaatgaggagctccaagaagactgaggtgaacctggaggcccctgagccaggggtggaagtgatcttctatctgtcggacagggagcccctccggctgggcagtggagagtacacagcagaggaactgtgcatcagggctgcacaggcatgccgtatctctcctctttgtcacaacctctttgccctgtatgacgagaacaccaagctctggtatgctccaaatcgcaccatcaccgttgatgacaagatgtccctccggctccactaccggatgaggttctatttcaccaattggcatggaaccaacgacaatgagcagtcagtgtggcgtcattctccaaagaagcagaaaaatggctacgagaaaaaaaagattccagatgcaacccctctccttgatgccagctcactggagtatctgtttgctcagggacagtatgatttggtgaaatgcctggctcctattcgagaccccaagaccgagcaggatggacatgatattgagaacgagtgtctagggatggctgtcctggccatctcacactatgccatgatgaagaagatgcagttgccagaactgcccaaggacatcagctacaagcgatatattccagaaacattgaataagtccatcagacagaggaaccttctcaccaggatgcggataaataatgttttcaaggatttcctaaaggaatttaacaacaagaccatttgtgacagcagcgtgtccacgcatgacctgaaggtgaaatacttggctaccttggaaactttgacaaaacattacggtgctgaaatatttgagacttccatgttactgatttcatcagaaaatgagatgaattggtttcattcgaatgacggtggaaacgttctctactacgaagtgatggtgactgggaatcttggaatccagtggaggcataaaccaaatgttgtttctgttgaaaaggaaaaaaataaactgaagcggaaaaaactggaaaataaacacaagaaggatgaggagaaaaacaagatccgggaagagtggaacaatttttcttacttccctgaaatcactcacattgtaataaaggagtctgtggtcagcattaacaagcaggacaacaagaaaatggaactgaagctctcttcccacgaggaggccttgtcctttgtgtccctggtagatggctacttccggctcacagcagatgcccatcattacctctgcaccgacgtggcccccccgttgatcgtccacaacatacagaatggctgtcatggtccaatctgtacagaatacgccatcaataaattgcggcaagaaggaagcgaggaggggatgtacgtgctgaggtggagctgcaccgactttgacaacatcctcatgaccgtcacctgctttgagaagtctgagcaggtgcagggtgcccagaagcagttcaagaactttcagatcgaggtgcagaagggccgctacagtctgcacggttcggaccgcagcttccccagcttgggagacctcatgagccacctcaagaagcagatcctgcgcacggataacatcagcttcatgctaaaacgctgctgccagcccaagccccgagaaatctccaacctgctggtggctactaagaaagcccaggagtggcagcccgtctaccccatgagccagctgagtttcgatcggatcctcaagaaggatctggtgcagggcgagcaccttgggagaggcacgagaacacacatctattctgggaccctgatggattacaaggatgacgaaggaacttctgaagagaagaagataaaagtgatcctcaaagtcttagaccccagccacagggatatttccctggccttcttcgaggcagccagcatgatgagacaggtctcccacaaacacatcgtgtacctctatggcgtctgtttccgcgacgtggagaatatcatggtggaagagtttgtggaagggggtcctctggatctcttcatgcaccggaaaagcgatgtccttaccacaccatggaaattcaaagttgccaaacagctggccagtgccctgagctacttggaggataaagacctggtccatggaaatgtgtgtactaaaaacctcctcctggcccgtgagggcatcgacagtgagtgtggcccattcatcaagctcagtgaccccggcatccccattacggtgctgtctaggcaagaatgcattgaacgaatcccatggattgctcctgagtgtgttgaggactccaagaacctgagtgtggctgctgacaagtggagctttggaaccacgctctgggaaatctgctacaatggcgagatccccttgaaagacaagacgctgattgagaaagagagattctatgaaagccggtgcaggccagtgacaccatcatgtaaggagctggctgacctcatgacccgctgcatgaactatgaccccaatcagaggcctttcttccgagccatcatgagagacattaataagcttgaagagcagaatccagatattgtttcagaaaaaaaaccagcaactgaagtggaccccacacattttgaaaagcgcttcctaaagaggatccgtgacttgggagagggccactttgggaaggttgagctctgcaggtatgaccccgaaggggacaatacaggggagcaggtggctgttaaatctctgaagcctgagagtggaggtaaccacatagctgatctgaaaaaggaaatcgagatcttaaggaacctctatcatgagaacattgtgaagtacaaaggaatctgcacagaagacggaggaaatggtattaagctcatcatggaatttctgccttcgggaagccttaaggaatatcttccaaagaataagaacaaaataaacctcaaacagcagctaaaatatgccgttcagatttgtaaggggatggactatttgggttctcggcaatacgttcaccgggacttggcagcaagaaatgtccttgttgagagtgaacaccaagtgaaaattggagacttcggtttaaccaaagcaattgaaaccgataaggagtattacaccgtcaaggatgaccgggacagccctgtgttttggtatgctccagaatgtttaatgcaatctaaattttatattgcctctgacgtctggtcttttggagtcactctgcatgagctgctgacttactgtgattcagattctagtcccatggctttgttcctgaaaatgataggcccaacccatggccagatgacagtcacaagacttgtgaatacgttaaaagaaggaaaacgcctgccgtgcccacctaactgtccagatgaggtttatcaacttatgaggaaatgctgggaattccaaccatccaatcggacaagctttcagaaccttattgaaggatttgaagcacttttaaaa

SEQ ID NO: 376 - DNA, 3462 bp, Homo sapiens
atgcagtatctaaatataaaagaggactgcaatgccatggctttctgtgctaaaatgaggagctccaagaagactgaggtgaacctggaggcccctgagccaggggtggaagtgatcttctatctgtcggacagggagcccctccggctgggcagtggagagtacacagcagaggaactgtgcatcagggctgcacaggcatgccgtatctctcctctttgtcacaacctctttgccctgtatgacgagaacaccaagctctggtatgctccaaatcgcaccatcaccgttgatgacaagatgtccctccggctccactaccggatgaggttctatttcaccaattggcatggaaccaacgacaatgagcagtcagtgtggcgtcattctccaaagaagcagaaaaatggctacgagaaaaaaaagattccagatgcaacccctctccttgatgccagctcactggagtatctgtttgctcagggacagtatgatttggtgaaatgcctggctcctattcgagaccccaagaccgagcaggatggacatgatattgagaacgagtgtctagggatggctgtcctggccatctcacactatgccatgatgaagaagatgcagttgccagaactgcccaaggacatcagctacaagcgatatattccagaaacattgaataagtccatcagacagaggaaccttctcaccaggatgcggataaataatgttttcaaggatttcctaaaggaatttaacaacaagaccatttgtgacagcagcgtgtccacgcatgacctgaaggtgaaatacttggctaccttggaaactttgacaaaacattacggtgctgaaatatttgagacttccatgttactgatttcatcagaaaatgagatgaattggtttcattcgaatgacggtggaaacgttctctactacgaagtgatggtgactgggaatcttggaatccagtggaggcataaaccaaatgttgtttctgttgaaaaggaaaaaaataaactgaagcggaaaaaactggaaaataaacacaagaaggatgaggagaaaaacaagatccgggaagagtggaacaatttttcttacttccctgaaatcactcacattgtaataaaggagtctgtggtcagcattaacaagcaggacaacaagaaaatggaactgaagctctcttcccacgaggaggccttgtcctttgtgtccctggtagatggctacttccggctcacagcagatgcccatcattacctctgcaccgacgtggcccccccgttgatcgtccacaacatacagaatggctgtcatggtccaatctgtacagaatacgccatcaataaattgcggcaagaaggaagcgaggaggggatgtacgtgctgaggtggagctgcaccgactttgacaacatcctcatgaccgtcacctgctttgagaagtctgagcaggtgcagggtgcccagaagcagttcaagaactttcagatcgaggtgcagaagggccgctacagtctgcacggttcggaccgcagcttccccagcttgggagacctcatgagccacctcaagaagcagatcctgcgcacggataacatcagcttcatgctaaaacgctgctgccagcccaagccccgagaaatctccaacctgctggtggctactaagaaagcccaggagtggcagcccgtctaccccatgagccagctgagtttcgatcggatcctcaagaaggatctggtgcagggcgagcaccttgggagaggcacgagaacacacatctattctgggaccctgatggattacaaggatgacgaaggaacttctgaagagaagaagataaaagtgatcctcaaagtcttagaccccagccacagggatatttccctggccttcttcgaggcagccagcatgatgagacaggtctcccacaaacacatcgtgtacctctatggcgtctgtgtccgcgacgtggagaatatcatggtggaagagtttgtggaagggggtcctctggatctcttcatgcaccggaaaagcgatgtccttaccacaccatggaaattcaaagttgccaaacagctggccagtgccctgatctacttggaggataaagacctggtccatggaaatgtgtgtactaaaaacctcctcctggcccgtgagggcatcgacagtgagtgtggcccattcatcaagctcagtgaccccggcatccccattacggtgctgtctaggcaagaatgcattgaacgaatcccatggattgctcctgagtgtgttgaggactccaagaacctgagtgtggctgctgacaagtggagctttggaaccacgctctgggaaatctgctacaatggcgagatccccttgaaagacaagacgctgattgagaaagagagattctatgaaagccggtgcaggccagtgacaccatcatgtaaggagctggctgacctcatgacccgctgcatgaactatgaccccaatcagaggcctttcttccgagccatcatgagagacattaataagcttgaagagcagaatccagatattgtttcagaaaaaaaaccagcaactgaagtggaccccacacattttgaaaagcgcttcctaaagaggatccgtgacttgggagagggccactttgggaaggttgagctctgcaggtatgaccccgaaggggacaatacaggggagcaggtggctgttaaatctctgaagcctgagagtggaggtaaccacatagctgatctgaaaaaggaaatcgagatcttaaggaacctctatcatgagaacattgtgaagtacaaaggaatctgcacagaagacggaggaaatggtattaagctcatcatggaatttctgccttcgggaagccttaaggaatatcttccaaagaataagaacaaaataaacctcaaacagcagctaaaatatgccgttcagatttgtaaggggatggactatttgggttctcggcaatacgttcaccgggacttggcagcaagaaatgtccttgttgagagtgaacaccaagtgaaaattggagacttcggtttaaccaaagcaattgaaaccgataaggagtattacaccgtcaaggatgaccgggacagccctgtgttttggtatgctccagaatgtttaatgcaatctaaattttatattgcctctgacgtctggtcttttggagtcactctgcatgagctgctgacttactgtgattcagattctagtcccatggctttgttcctgaaaatgataggcccaacccatggccagatgacagtcacaagacttgtgaatacgttaaaagaaggaaaacgcctgccgtgcccacctaactgtccagatgaggtttatcaacttatgaggaaatgctgggaattccaaccatccaatcggacaagctttcagaaccttattgaaggatttgaagcacttttaaaa

SEQ ID NO: 377 - DNA, 3465 bp, Homo sapiens
atgccaggaggagggccagagatggatgactacatggagacgctgaaggatgaagaggacgccttgtgggagaatgtggagtgtaaccggcacatgctcagccgctatatcaaccctgccaagctcacgccctacctgcgtcagtgtaaggtcattgatgagcaggatgaagatgaagtgcttaatgcccctatgctgccatccaagatcaaccgagcaggccggctgttggacattctacataccaaggggcaaaggggctatgtggtcttcttggagagcctagaattttattacccagaactgtacaaactggtgactgggaaagagcccactcggagattctccaccattgtggtggaggaaggccacgagggcctcacgcacttcctgatgaacgaggtcatcaagctgcagcagcagatgaaggccaaggacctgcaacgctgcgagctgctggccaggttgcggcagctggaggatgagaagaagcagatgacgctgacgcgcgtggagctgctaaccttccaggagcggtactacaagatgaaggaagagcgggacagctacaatgacgagctggtcaaggtgaaggacgacaactacaacttagccatgcgctacgcacagctcagtgaggagaagaacatggcggtcatgaggagccgagacctccaactcgagatcgatcagctaaagcaccggttgaataagatggaggaggaatgtaagctggagagaaatcagtctctaaaactgaagaatgacattgaaaatcggcccaagaaggagcaggttctggaactggagcgggagaatgaaatgctgaagaccaaaaaccaggagctgcagtccatcatccaggccgggaagcgcagcctgccagactcagacaaggccatcctggacatcttggaacacgaccgcaaggaggccctggaggacaggcaggagctggtcaacaggatctacaacctgcaggaggaggcccgccaggcagaggagctgcgagacaagtacctggaggagaaggaggacctggagctcaagtgctcgaccctgggaaaggactgtgaaatgtacaagcaccgcatgaacacggtcatgctgcagctggaggaggtggagcgggagcgggaccaggccttccactcccgagatgaagctcagacacagtactcgcagtgcttaatcgaaaaggacaagtacaggaagcagatccgcgagctggaggagaagaacgacgagatgaggatcgagatggtgcggcgggaggcctgcatcgtcaacctggagagcaagctgcggcgcctctccaaggacagcaacaacctggaccagagtctgcccaggaacctgccagtaaccatcatctctcaggactttggggatgccagccccaggaccaatggtcaagaagctgacgattcttccacctcggaggagtcacctgaagacagcaagtacttcctgccctaccatccgccccagcgcaggatgaacctgaagggcatccagctgcagagagccaaatcccccatcagcctgaagcgaacatcagattttcaagccaaggggcacgaggaagaaggcacggacgccagccctagctcctgcggatctctgcccatcaccaactccttcaccaagatgcagcccccccggagccgcagcagcatcatgtcaatcaccgccgagcccccgggaaacgactccatcgtcagacgctacaaggaggacgcgccccatcgcagcacagtcgaagaagacaatgacagcggcgggtttgacgccttagatctggatgatgacagtcacgaacgctactccttcggaccctcctccatccactcctcctcctcctcccaccaatccgagggcctggatgcctacgacctggagcaggtcaacctcatgttcaggaagttctctctggaaagacccttccggccttcggtcacctctgtggggcacgtgcggggcccagggccctcggtgcagcacacgacgctgaatggcgacagcctcacctcccagctcaccctgctggggggcaacgcgcgagggagcttcgtgcactcggtcaagcctggctctctggccgagaaagccggcctccgtgagggccaccagctgctgctgctagaaggctgcatccgaggcgagaggcagagtgtcccgttggacacatgcaccaaagaggaagcccactggaccatccagaggtgcagcggccccgtcacgctgcactacaaggtcaaccacgaagggtaccggaagctggtgaaggacatggaggacggcctgatcacatcgggggactcgttctacatccggctgaacctgaacatctccagccagctggacgcctgcaccatgtccctgaagtgtgacgatgttgtgcacgtccgtgacaccatgtaccaggacaggcacgagtggctgtgcgcgcgggtcgaccctttcacagaccatgacctggatatgggcaccatacccagctacagccgagcccagcagctcctcctggtgaaactgcagcgcctgatgcaccgaggcagccgggaggaggtagacggcacccaccacaccctgcgggcactccggaacaccctgcagccagaagaagcgctttcaacaagcgacccccgggtcagcccccgtctctcgcgagcaagcttcctttttggccagctccttcagttcgtcagcaggtccgagaacaagtataagcggatgaacagcaacgagcgggtccgcatcatctcggggagtccgctagggagcctggcccggtcctcgctggacgccaccaagctcttgactgagaagcaggaagagctggaccctgagagcgagctgggcaagaacctcagcctcatcccctacagcctggtacgcgccttctactgcgagcgccgccggcccgtgctcttcacacccaccgtgctggccaagacgctggtgcagaggctgctcaactcgggaggtgccatggagttcaccatctgcaagtcagatatcgtcacaagagatgagttcctcagaaggcagaagacggagaccatcatctactcccgagagaagaaccccaacgcgttcgaatgcatcgcccctgccaacattgaagctgtggccgccaagaacaagcactgcctgctggaggctgggatcggctgcacaagagacttgatcaagtccaacatctaccccatcgtgctcttcatccgggtgtgtgagaagaacatcaagaggttcagaaagctgctgccccgacctgagacggaggaggagttcctgcgcgtgtgccggctgaaggagaaggagctggaggccctgccgtgcctgtacgccacggtggaacctgacatgtggggcagcgtagaggagctgctccgcgttgtcaaggacaagatcggcgaggagcagcgcaagaccatctgggtggacgaggaccagctgtga

SEQ ID NO: 378 - DNA, 3465 bp, Homo sapiens
atgccaggaggagggccagagatggatgactacatggagacgctgaaggatgaagaggacgccttgtgggagaatgtggagtgtaaccggcacatgctcagccgctatatcaaccctgccaagctcacgccctacctgcgtcagtgtaaggtcattgatgagcaggatgaagatgaagtgcttaatgcccctatgctgccatccaagatcaaccgagcaggccggctgttggacattctacataccaaggggcaaaggggctatgtggtcttcttggagagcctagaattttattacccagaactgtacaaactggtgactgggaaagagcccactcggagattctccaccattgtggtggaggaaggccacgagggcctcacgcacttcctgatgaacgaggtcatcaagctgcagcagcagatgaaggccaaggacctgcaacgctgcgagctgctggccaggttgcggcagctggaggatgagaagaagcagatgacgctgacgcgcgtggagctgctaaccttccaggagcggtactacaagatgaaggaagagcgggacagctacaatgacgagctggtcaaggtgaaggacgacaactacaacttagccatgcgctacgcacagctcagtgaggagaagaacatggcggtcatgaggagccgagacctccaactcgagatcgatcagctaaagcaccggttgaataagatggaggaggaatgtaagctggagagaaatcagtctctaaaactgaagaatgacattgaaaatcggcccaagaaggagcaggttctggaactggagcgggagaatgaaatgctgaagaccaaaaaccaggagctgcagtccatcatccaggccgggaagcgcagcctgccagactcagacaaggccatcctggacatcttggaacacgaccgcaaggaggccctggaggacaggcaggagctggtcaacaggatctacaacctgcaggaggaggcccgccaggcagaggagctgcgagacaagtacctggaggagaaggaggacctggagctcaagtgctcgaccctgggaaaggactgtgaaatgtacaagcaccgcatgaacacggtcatgctgcagctggaggaggtggagcgggagcgggaccaggccttccactcccgagatgaagctcagacacagtactcgcagtgcttaatcgaaaaggacaagtacaggaagcagatccgcgagctggaggagaagaacgacgagatgaggatcgagatggtgcggcgggaggcctgcatcgtcaacctggagagcaagctgcggcgcctctccaaggacagcaacaacctggaccagagtctgcccaggaacctgccagtaaccatcatctctcaggactttggggatgccagccccaggaccaatggtcaagaagctgacgattcttccacctcggaggagtcacctgaagacagcaagtacttcctgccctaccatccgccccagcgcaggatgaacctgaagggcatccagctgcagagagccaaatcccccatcagcctgaagcgaacatcagattttcaagccaaggggcacgaggaagaaggcacggacgccagccctagctcctgcggatctctgcccatcaccaactccttcaccaagatgcagcccccccggagccgcagcagcatcatgtcaatcaccgccgagcccccgggaaacgactccatcgtcagacgctacaaggaggacgcgccccatcgcagcacagtcgaagaagacaatgacagcggcgggtttgacgccttagatctggatgatgacagtcacgaacgctactccttcggaccctccttcatccactcctcctcctcctcccaccaatccgagggcctggatgcctacgacctggagcaggtcaacctcatgttcaggaagttctctctggaaagacccttccggccttcggtcacctctgtggggcacgtgcggggcccagggccctcggtgcagcacacgacgctgaatggcgacagcctcacctcccagctcaccctgctggggggcaacgcgcgagggagcttcgtgcactcggtcaagcctggctctctggccgagaaagccggcctccgtgagggccaccagctgctgctgctagaaggctgcatccgaggcgagaggcagagtgtcccgttggacacatgcaccaaagaggaagcccactggaccatccagaggtgcagcggccccgtcacgctgcactacaaggtcaaccacgaagggtaccggaagctggtgaaggacatggaggacggcctgatcacatcgggggactcgttctacatccggctgaacctgaacatctccagccagctggacgcctgcaccatgtccctgaagtgtgacgatgttgtgcacgtccgtgacaccatgtaccaggacaggcacgagtggctgtgcgcgcgggtcgaccctttcacagaccatgacctggatatgggcaccatacccagctacagccgagcccagcagctcctcctggtgaaactgcagcgcctgatgcaccgaggcagccgggaggaggtagacggcacccaccacaccctgcgggcactccggaacaccctgcagccagaagaagcgctttcaacaagcgacccccgggtcagcccccgtctctcgcgagcaagcttcctttttggccagctccttcagttcgtcagcaggtccgagaacaagtataagcggatgaacagcaacgagcgggtccgcatcatctcggggagtccgctagggagcctggcccggtcctcgctggacgccaccaagctcttgactgagaagcaggaagagctggaccctgagagcgagctgggcaagaacctcagcctcatcccctacagcctggtacgcgccttctactgcgagcgccgccggcccgtgctcttcacacccaccgtgctggccaagacgctggtgcagaggctgctcaactcgggaggtgccatggagttcaccatctgcaagtcagatatcgtcacaagagatgagttcctcagaaggcagaagacggagaccatcatctactcccgagagaagaaccccaacgcgttcgaatgcatcgcccctgccaacattgaagctgtggccgccaagaacaagcactgcctgctggaggctgggatcggctgcacaagagacttgatcaagtccaacatctaccccatcgtgctcttcatccgggtgtgtgagaagaacatcaagaggttcagaaagctgctgccccgacctgagacggaggaggagttcctgcgcgtgtgccggctgaaggagaaggagctggaggccctgccgtgcctgtacgccacggtggaacctgacatgtggggcagcgtagaggagctgctccgcgttgtcaaggacaagatcggcgaggagcagcgcaagaccatctgggtggacgaggaccagctgtga

SEQ ID NO: 379 - DNA, 3465 bp, Homo sapiens
atgccaggaggagggccagagatggatgactacatggagacgctgaaggatgaagaggacgccttgtgggagaatgtggagtgtaaccggcacatgctcagccgctatatcaaccctgccaagctcacgccctacctgcgtcagtgtaaggtcattgatgagcaggatgaagatgaagtgcttaatgcccctatgctgccatccaagatcaaccgagcaggccggctgttggacattctacataccaaggggcaaaggggctatgtggtcttcttggagagcctagaattttattacccagaactgtacaaactggtgactgggaaagagcccactcggagattctccaccattgtggtggaggaaggccacgagggcctcacgcacttcctgatgaacgaggtcatcaagctgcagcagcagatgaaggccaaggacctgcaacgctgcgagctgctggccaggttgcggcagctggaggatgagaagaagcagatgacgctgacgcgcgtggagctgctaaccttccaggagcggtactacaagatgaaggaagagcgggacagctacaatgacgagctggtcaaggtgaaggacgacaactacaacttagccatgcgctacgcacagctcagtgaggagaagaacatggcggtcatgaggagccgagacctccaactcgagatcgatcagctaaagcaccggttgaataagatggaggaggaatgtaagctggagagaaatcagtctctaaaactgaagaatgacattgaaaatcggcccaagaaggagcaggttctggaactggagcgggagaatgaaatgctgaagaccaaaaaccaggagctgcagtccatcatccaggccgggaagcgcagcctgccagactcagacaaggccatcctggacatcttggaacacgaccgcaaggaggccctggaggacaggcaggagctggtcaacaggatctacaacctgcaggaggaggcccgccaggcagaggagctgcgagacaagtacctggaggagaaggaggacctggagctcaagtgctcgaccctgggaaaggactgtgaaatgtacaagcaccgcatgaacacggtcatgctgcagctggaggaggtggagcgggagcgggaccaggccttccactcccgagatgaagctcagacacagtactcgcagtgcttaatcgaaaaggacaagtacaggaagcagatccgcgagctggaggagaagaacgacgagatgaggatcgagatggtgcggcgggaggcctgcatcgtcaacctggagagcaagctgcggcgcctctccaaggacagcaacaacctggaccagagtctgcccaggaacctgccagtaaccatcatctctcaggactttggggatgccagccccaggaccaatggtcaagaagctgacgattcttccacctcggaggagtcacctgaagacagcaagtacttcctgccctaccatccgccccagcgcaggatgaacctgaagggcatccagctgcagagagccaaatcccccatcagcctgaagcgaacatcagattttcaagccaaggggcacgaggaagaaggcacggacgccagccctagctcctgcggatctctgcccatcaccaactccttcaccaagatgcagcccccccggagccgcagcagcatcatgtcaatcaccgccgagcccccgggaaacgactccatcgtcagacgctacaaggaggacgcgccccatcgcagcacagtcgaagaagacaatgacagcggcgggtttgacgccttagatctggatgatgacagtcacgaacgctactccttcggaccctcctccatccactcctcctcctcctcccaccaatccaagggcctggatgcctacgacctggagcaggtcaacctcatgttcaggaagttctctctggaaagacccttccggccttcggtcacctctgtggggcacgtgcggggcccagggccctcggtgcagcacacgacgctgaatggcgacagcctcacctcccagctcaccctgctggggggcaacgcgcgagggagcttcgtgcactcggtcaagcctggctctctggccgagaaagccggcctccgtgagggccaccagctgctgctgctagaaggctgcatccgaggcgagaggcagagtgtcccgttggacacatgcaccaaagaggaagcccactggaccatccagaggtgcagcggccccgtcacgctgcactacaaggtcaaccacgaagggtaccggaagctggtgaaggacatggaggacggcctgatcacatcgggggactcgttctacatccggctgaacctgaacatctccagccagctggacgcctgcaccatgtccctgaagtgtgacgatgttgtgcacgtccgtgacaccatgtaccaggacaggcacgagtggctgtgcgcgcgggtcgaccctttcacagaccatgacctggatatgggcaccatacccagctacagccgagcccagcagctcctcctggtgaaactgcagcgcctgatgcaccgaggcagccgggaggaggtagacggcacccaccacaccctgcgggcactccggaacaccctgcagccagaagaagcgctttcaacaagcgacccccgggtcagcccccgtctctcgcgagcaagcttcctttttggccagctccttcagttcgtcagcaggtccgagaacaagtataagcggatgaacagcaacgagcgggtccgcatcatctcggggagtccgctagggagcctggcccggtcctcgctggacgccaccaagctcttgactgagaagcaggaagagctggaccctgagagcgagctgggcaagaacctcagcctcatcccctacagcctggtacgcgccttctactgcgagcgccgccggcccgtgctcttcacacccaccgtgctggccaagacgctggtgcagaggctgctcaactcgggaggtgccatggagttcaccatctgcaagtcagatatcgtcacaagagatgagttcctcagaaggcagaagacggagaccatcatctactcccgagagaagaaccccaacgcgttcgaatgcatcgcccctgccaacattgaagctgtggccgccaagaacaagcactgcctgctggaggctgggatcggctgcacaagagacttgatcaagtccaacatctaccccatcgtgctcttcatccgggtgtgtgagaagaacatcaagaggttcagaaagctgctgccccgacctgagacggaggaggagttcctgcgcgtgtgccggctgaaggagaaggagctggaggccctgccgtgcctgtacgccacggtggaacctgacatgtggggcagcgtagaggagctgctccgcgttgtcaaggacaagatcggcgaggagcagcgcaagaccatctgggtggacgaggaccagctgtga

SEQ ID NO: 380 - DNA, 2310 bp, Homo sapiens
atggcccaatggaatcagctacagcagcttgacacacggtacctggagcagctccatcagctctacagtgacagcttcccaatggagctgcggcagtttctggccccttggattgagagtcaagattgggcatatgcggccagcaaagaatcacatgccactttggtgtttcataatctcctgggagagattgaccagcagtatagccgcttcctgcaagagtcgaatgttctctatcagcacaatctacgaagaatcaagcagtttcttcagagcaggtatcttgagaagccaatggagattgcccggattgtggcccggtgcctgtgggaagaatcacgccttctacagactgcagccactgcggcccagcaagggggccaggccaaccaccccacagcagccgtggtgacggagaagcagcagatgctggagcagcaccttcaggatgtccggaagagagtgcaggatctagaacagaaaatgaaagtggtagagaatctccaggatgactttgatttcaactataaaaccctcaagagtcaaggagacatgcaagatctgaatggaaacaaccagtcagtgaccaggcagaagatgcagcagctggaacagatgctcactgcgctggaccagatgcggagaagcatcgtgagtgagctggcggggcttttgtcagcgatggagtacgtgcagaaaactctcacggacgaggagctggctgactggaagaggcggcaacagattgcctgcattggaggcccgcccaacatctgcctagatcggctagaaaactggataacgtcattagcagaatctcaacttcagacccgtcaacaaattaagaaactggaggagttgcagcaaaaagtttcctacaaaggggaccccattgtacagcaccggccgatgctggaggagagaatcgtggagctgtttagaaacttaatgaaaagtgcctttgtggtggagcggcagccctgcatgcccatgcatcctgaccggcccctcgtcatcaagaccggcgtccagttcactactaaagtcaggttgctggtcaaattccctgagttgaattatcagcttaaaattaaagtgtgcattgacaaagactctggggacgttgcagctctcagaggatcccggaaatttaacattctgggcacaaacacaaaagtgatgaacatggaagaatccaacaacggcagcctctctgcagaattcaaacacttgaccctgagggagcagagatgtgggaatgggggccgagccaattgtgatgcttccctgattgtgactgaggagctgcacctgatcacctttgagaccgaggtgtatcaccaaggcctcaagattgacctagagacccactccttgccagttgtggtgatctccaacatctgtcagatgccaaatgcctgggcgtccatcctgtggtacaacatgctgaccaacaatcccaagaatgtaaacttttttaccaagcccccaattggaacctgggatcaagtggccgaggtcctgagctggcagttctcctccaccaccaagcgaggactgagcatcgagcagctgactacactggcagagaaactcttgggacctggtgtgaattattcagggtgtcagatcacatgggctaaattttgcaaagaaaacatggctggcaagggcttctccttctgggtctggctggacaatatcattgaccttgtgaaaaagtacatcctggccctttggaacgaagggtacatcatgggctttatcagtaaggagcgggagcgggccatcttgagcactaagcctccaggcaccttcctgctaagattcagtgaaagcagcaaagaaggaggcgtcactttcacttgggtggagaaggacatcagcggtaagacccagatccagtccgtggaaccatacacaaagcagcagctgaacaacatgtcatttgctgaaatcatcatgggctataagatcatggatgctaccaatatcctggtgtctccactggtctatctctatcctgacattcccaaggaggaggcattcggaaagtattgtcggccagagagccaggagcatcctgaagctgacccaggcgctgccccatacctgaagaccaagtttatctgtgtgacaccaacgacctgcagcaataccattgacctgccgatgtccccccgcactttagattcattgatgcagtttggaaataatggtgaaggtgctgaaccctcagcaggagggcagtttgagtccctcacctttgacatggagttgacctcggagtgcgctacctcccccatgtga

SEQ ID NO: 381 - DNA, 2310 bp, Homo sapiens
atggcccaatggaatcagctacagcagcttgacacacggtacctggagcagctccatcagctctacagtgacagcttcccaatggagctgcggcagtttctggccccttggattgagagtcaagattgggcatatgcggccagcaaagaatcacatgccactttggtgtttcataatctcctgggagagattgaccagcagtatagccgcttcctgcaagagtcgaatgttctctatcagcacaatctacgaagaatcaagcagtttcttcagagcaggtatcttgagaagccaatggagattgcccggattgtggcccggtgcctgtgggaagaatcacgccttctacagactgcagccactgcggcccagcaagggggccaggccaaccaccccacagcagccgtggtgacggagaagcagcagatgctggagcagcaccttcaggatgtccggaagagagtgcaggatctagaacagaaaatgaaagtggtagagaatctccaggatgactttgatttcaactataaaaccctcaagagtcaaggagacatgcaagatctgaatggaaacaaccagtcagtgaccaggcagaagatgcagcagctggaacagatgctcactgcgctggaccagatgcggagaagcatcgtgagtgagctggcggggcttttgtcagcgatggagtacgtgcagaaaactctcacggacgaggagctggctgactggaagaggcggcaacagattgcctgcattggaggcccgcccaacatctgcctagatcggctagaaaactggataacgtcattagcagaatctcaacttcagacccgtcaacaaattaagaaactggaggagttgcagcaaaaagtttcctacaaaggggaccccattgtacagcaccggccgatgctggaggagagaatcgtggagctgtttagaaacttaatgaaaagtgcctttgtggtggagcggcagccctgcatgcccatgcatcctgaccggcccctcgtcatcaagaccggcgtccagttcactactaaagtcaggttgctggtcaaattccctgagttgaattatcagcttaaaattaaagtgtgcattgacaaagactctggggacgttgcagctctcagaggatcccggaaatttaacattctgggcacaaacacaaaagtgatgaacatggaagaatccaacaacggcagcctctctgcagaattcaaacacttgaccctgagggagcagagatgtgggaatgggggccgagccaattgtgatgcttccctgattgtgactgaggagctgcacctgatcacctttgagaccgaggtgtatcaccaaggcctcaagattgacctagagacccactccttgccagttgtggtgatctccaacatctgtcagatgccaaatgcctgggcgtccatcctgtggtacaacatgctgaccaacaatcccaagaatgtaaacttttttaccaagcccccaattggaacctgggatcaagtggccgaggtcctgagctggcagttctcctccaccaccaagcgaggactgagcatcgagcagctgactacactggcagagaaactcttgggacctggtgtgaattattcagggtgtcagatcacatgggctaaattttgcaaagaaaacatggctggcaagggcttctccttctgggtctggctggacaatatcattgaccttgtgaaaaagtacatcctggccctttggaacgaagggtacatcatgggctttatcagtaaggagcgggagcgggccatcttgagcactaagcctccaggcaccttcctgctaagattcagtgaaagcagcaaagaaggaggcgtcactttcacttgggtggagaaggacatcagcggtaagacccagatccagtccgtggaaccatacacaaagcagcagctgaacaacatgtcatttgctgaaatcatcatgggctataagatcatgtatgctaccaatatcctggtgtctccactggtctatctctatcctgacattcccaaggaggaggcattcggaaagtattgtcggccagagagccaggagcatcctgaagctgacccaggcgctgccccatacctgaagaccaagtttatctgtgtgacaccaacgacctgcagcaataccattgacctgccgatgtccccccgcactttagattcattgatgcagtttggaaataatggtgaaggtgctgaaccctcagcaggagggcagtttgagtccctcacctttgacatggagttgacctcggagtgcgctacctcccccatgtga

SEQ ID NO: 382 - DNA, 2310 bp, Homo sapiens
atggcccaatggaatcagctacagcagcttgacacacggtacctggagcagctccatcagctctacagtgacagcttcccaatggagctgcggcagtttctggccccttggattgagagtcaagattgggcatatgcggccagcaaagaatcacatgccactttggtgtttcataatctcctgggagagattgaccagcagtatagccgcttcctgcaagagtcgaatgttctctatcagcacaatctacgaagaatcaagcagtttcttcagagcaggtatcttgagaagccaatggagattgcccggattgtggcccggtgcctgtgggaagaatcacgccttctacagactgcagccactgcggcccagcaagggggccaggccaaccaccccacagcagccgtggtgacggagaagcagcagatgctggagcagcaccttcaggatgtccggaagagagtgcaggatctagaacagaaaatgaaagtggtagagaatctccaggatgactttgatttcaactataaaaccctcaagagtcaaggagacatgcaagatctgaatggaaacaaccagtcagtgaccaggcagaagatgcagcagctggaacagatgctcactgcgctggaccagatgcggagaagcatcgtgagtgagctggcggggcttttgtcagcgatggagtacgtgcagaaaactctcacggacgaggagctggctgactggaagaggcggcaacagattgcctgcattggaggcccgcccaacatctgcctagatcggctagaaaactggataacgtcattagcagaatctcaacttcagacccgtcaacaaattaagaaactggaggagttgcagcaaaaagtttcctacaaaggggaccccattgtacagcaccggccgatgctggaggagagaatcgtggagctgtttagaaacttaatgaaaagtgcctttgtggtggagcggcagccctgcatgcccatgcatcctgaccggcccctcgtcatcaagaccggcgtccagttcactactaaagtcaggttgctggtcaaattccctgagttgaattatcagcttaaaattaaagtgtgcattgacaaagactctggggacgttgcagctctcagaggatcccggaaatttaacattctgggcacaaacacaaaagtgatgaacatggaagaatccaacaacggcagcctctctgcagaattcaaacacttgaccctgagggagcagagatgtgggaatgggggccgagccaattgtgatgcttccctgattgtgactgaggagctgcacctgatcacctttgagaccgaggtgtatcaccaaggcctcaagattgacctagagacccactccttgccagttgtggtgatctccaacatctgtcagatgccaaatgcctgggcgtccatcctgtggtacaacatgctgaccaacaatcccaagaatgtaaacttttttaccaagcccccaattggaacctgggatcaagtggccgaggtcctgagctggcagttctcctccaccaccaagcgaggactgagcatcgagcagctgactacactggcagagaaactcttgggacctggtgtgaattattcagggtgtcagatcacatgggctaaattttgcaaagaaaacatggctggcaagggcttctccttctgggtctggctggacaatatcattgaccttgtgaaaaagtacatcctggccctttggaacgaagggtacatcatgggctttatcagtaaggagcgggagcgggccatcttgagcactaagcctccaggcaccttcctgctaagattcagtgaaagcagcaaagaaggaggcgtcactttcacttgggtggagaaggacatcagcggtaagacccagatccagtccgtggaaccattcacaaagcagcagctgaacaacatgtcatttgctgaaatcatcatgggctataagatcatggatgctaccaatatcctggtgtctccactggtctatctctatcctgacattcccaaggaggaggcattcggaaagtattgtcggccagagagccaggagcatcctgaagctgacccaggcgctgccccatacctgaagaccaagtttatctgtgtgacaccaacgacctgcagcaataccattgacctgccgatgtccccccgcactttagattcattgatgcagtttggaaataatggtgaaggtgctgaaccctcagcaggagggcagtttgagtccctcacctttgacatggagttgacctcggagtgcgctacctcccccatgtga

SEQ ID NO: 383 - DNA, 2310 bp, Homo sapiens
atggcccaatggaatcagctacagcagcttgacacacggtacctggagcagctccatcagctctacagtgacagcttcccaatggagctgcggcagtttctggccccttggattgagagtcaagattgggcatatgcggccagcaaagaatcacatgccactttggtgtttcataatctcctgggagagattgaccagcagtatagccgcttcctgcaagagtcgaatgttctctatcagcacaatctacgaagaatcaagcagtttcttcagagcaggtatcttgagaagccaatggagattgcccggattgtggcccggtgcctgtgggaagaatcacgccttctacagactgcagccactgcggcccagcaagggggccaggccaaccaccccacagcagccgtggtgacggagaagcagcagatgctggagcagcaccttcaggatgtccggaagagagtgcaggatctagaacagaaaatgaaagtggtagagaatctccaggatgactttgatttcaactataaaaccctcaagagtcaaggagacatgcaagatctgaatggaaacaaccagtcagtgaccaggcagaagatgcagcagctggaacagatgctcactgcgctggaccagatgcggagaagcatcgtgagtgagctggcggggcttttgtcagcgatggagtacgtgcagaaaactctcacggacgaggagctggctgactggaagaggcggcaacagattgcctgcattggaggcccgcccaacatctgcctagatcggctagaaaactggataacgtcattagcagaatctcaacttcagacccgtcaacaaattaagaaactggaggagttgcagcaaaaagtttcctacaaaggggaccccattgtacagcaccggccgatgctggaggagagaatcgtggagctgtttagaaacttaatgaaaagtgcctttgtggtggagcggcagccctgcatgcccatgcatcctgaccggcccctcgtcatcaagaccggcgtccagttcactactaaagtcaggttgctggtcaaattccctgagttgaattatcagcttaaaattaaagtgtgcattgacaaagactctggggacgttgcagctctcagaggatcccggaaatttaacattctgggcacaaacacaaaagtgatgaacatggaagaatccaacaacggcagcctctctgcagaattcaaacacttgaccctgagggagcagagatgtgggaatgggggccgagccaattgtgatgcttccctgattgtgactgaggagctgcacctgatcacctttgagaccgaggtgtatcaccaaggcctcaagattgacctagagacccactccttgccagttgtggtgatctccaacatctgtcagatgccaaatgcctgggcgtccatcctgtggtacaacatgctgaccaacaatcccaagaatgtaaacttttttaccaagcccccaattggaacctgggatcaagtggccgaggtcctgagctggcagttctcctccaccaccaagcgaggactgagcatcgagcagctgactacactggcagagaaactcttgggacctggtgtgaattattcagggtgtcagatcacatgggctaaattttgcaaagaaaacatggctggcaagggcttctccttctgggtctggctggacaatatcattgaccttgtgaaaaagtacatcctggccctttggaacgaagggtacatcatgggctttatcagtaaggagcgggagcgggccatcttgagcactaagcctccaggcaccttcctgctaagattcagtgaaagcagcaaagaaggaggcgtcactttcacttgggtggagaaggacatcagcggtaagacccagatccagtccgtggaaccatacacaaagcagcagctgaacaacatgtcatttgctgaaatcatcatgggctataagatcatggatgctaccaatatcctggtgtctccactggtctatctctatcctgacattcccaaggaggaggcattcggaaagtattgtcggccagagagccaggagcatcctgaagctgacccaggcgctaccccatacctgaagaccaagtttatctgtgtgacaccaacgacctgcagcaataccattgacctgccgatgtccccccgcactttagattcattgatgcagtttggaaataatggtgaaggtgctgaaccctcagcaggagggcagtttgagtccctcacctttgacatggagttgacctcggagtgcgctacctcccccatgtga

SEQ ID NO: 384 - DNA, 2310 bp, Homo sapiens
atggcccaatggaatcagctacagcagcttgacacacggtacctggagcagctccatcagctctacagtgacagcttcccaatggagctgcggcagtttctggccccttggattgagagtcaagattgggcatatgcggccagcaaagaatcacatgccactttggtgtttcataatctcctgggagagattgaccagcagtatagccgcttcctgcaagagtcgaatgttctctatcagcacaatctacgaagaatcaagcagtttcttcagagcaggtatcttgagaagccaatggagattgcccggattgtggcccggtgcctgtgggaagaatcacgccttctacagactgcagccactgcggcccagcaagggggccaggccaaccaccccacagcagccgtggtgacggagaagcagcagatgctggagcagcaccttcaggatgtccggaagagagtgcaggatctagaacagaaaatgaaagtggtagagaatctccaggatgactttgatttcaactataaaaccctcaagagtcaaggagacatgcaagatctgaatggaaacaaccagtcagtgaccaggcagaagatgcagcagctggaacagatgctcactgcgctggaccagatgcggagaagcatcgtgagtgagctggcggggcttttgtcagcgatggagtacgtgcagaaaactctcacggacgaggagctggctgactggaagaggcggcaacagattgcctgcattggaggcccgcccaacatctgcctagatcggctagaaaactggataacgtcattagcagaatctcaacttcagacccgtcaacaaattaagaaactggaggagttgcagcaaaaagtttcctacaaaggggaccccattgtacagcaccggccgatgctggaggagagaatcgtggagctgtttagaaacttaatgaaaagtgcctttgtggtggagcggcagccctgcatgcccatgcatcctgaccggcccctcgtcatcaagaccggcgtccagttcactactaaagtcaggttgctggtcaaattccctgagttgaattatcagcttaaaattaaagtgtgcattgacaaagactctggggacgttgcagctctcagaggatcccggaaatttaacattctgggcacaaacacaaaagtgatgaacatggaagaatccaacaacggcagcctctctgcagaattcaaacacttgaccctgagggagcagagatgtgggaatgggggccgagccaattgtgatgcttccctgattgtgactgaggagctgcacctgatcacctttgagaccgaggtgtatcaccaaggcctcaagattgacctagagacccactccttgccagttgtggtgatctccaacatctgtcagatgccaaatgcctgggcgtccatcctgtggtacaacatgctgaccaacaatcccaagaatgtaaacttttttaccaagcccccaattggaacctgggatcaagtggccgaggtcctgagctggcagttctcctccaccaccaagcgaggactgagcatcgagcagctgactacactggcagagaaactcttgggacctggtgtgaattattcagggtgtcagatcacatgggctaaattttgcaaagaaaacatggctggcaagggcttctccttctgggtctggctggacaatatcattgaccttgtgaaaaagtacatcctggccctttggaacgaagggtacatcatgggctttatcagtaaggagcgggagcgggccatcttgagcactaagcctccaggcaccttcctgctaagattcagtgaaagcaggaaagaaggaggcgtcactttcacttgggtggagaaggacatcagcggtaagacccagatccagtccgtggaaccatacacaaagcagcagctgaacaacatgtcatttgctgaaatcatcatgggctataagatcatggatgctaccaatatcctggtgtctccactggtctatctctatcctgacattcccaaggaggaggcattcggaaagtattgtcggccagagagccaggagcatcctgaagctgacccaggcgctgccccatacctgaagaccaagtttatctgtgtgacaccaacgacctgcagcaataccattgacctgccgatgtccccccgcactttagattcattgatgcagtttggaaataatggtgaaggtgctgaaccctcagcaggagggcagtttgagtccctcacctttgacatggagttgacctcggagtgcgctacctcccccatgtga

SEQ ID NO: 385 - DNA, 2310 bp, Homo sapiens
atggcccaatggaatcagctacagcagcttgacacacggtacctggagcagctccatcagctctacagtgacagcttcccaatggagctgcggcagtttctggccccttggattgagagtcaagattgggcatatgcggccagcaaagaatcacatgccactttggtgtttcataatctcctgggagagattgaccagcagtatagccgcttcctgcaagagtcgaatgttctctatcagcacaatctacgaagaatcaagcagtttcttcagagcaggtatcttgagaagccaatggagattgcccggattgtggcccggtgcctgtgggaagaatcacgccttctacagactgcagccactgcggcccagcaagggggccaggccaaccaccccacagcagccgtggtgacggagaagcagcagatgctggagcagcaccttcaggatgtccggaagagagtgcaggatctagaacagaaaatgaaagtggtagagaatctccaggatgactttgatttcaactataaaaccctcaagagtcaaggagacatgcaagatctgaatggaaacaaccagtcagtgaccaggcagaagatgcagcagctggaacagatgctcactgcgctggaccagatgcggagaagcatcgtgagtgagctggcggggcttttgtcagcgatggagtacgtgcagaaaactctcacggacgaggagctggctgactggaagaggcggcaacagattgcctgcattggaggcccgcccaacatctgcctagatcggctagaaaactggataacgtcattagcagaatctcaacttcagacccgtcaacaaattaagaaactggaggagttgcagcaaaaagtttcctacaaaggggaccccattgtacagcaccggccgatgctggaggagagaatcgtggagctgtttagaaacttaatgaaaagtgcctttgtggtggagcggcagccctgcatgcccatgcatcctgaccggcccctcgtcatcaagaccggcgtccagttcactactaaagtcaggttgctggtcaaattccctgagttgaattatcagcttaaaattaaagtgtgcattgacaaagactctggggacgttgcagctctcagaggatcccggaaatttaacattctgggcacaaacacaaaagtgatgaacatggaagaatccaacaacggcagcctctctgcagaattcaaacacttgaccctgagggagcagagatgtgggaatgggggccgagccaattgtgatgcttccctgattgtgactgaggagctgcacctgatcacctttgagaccgaggtgtatcaccaaggcctcaagattgacctagagacccactccttgccagttgtggtgatctccaacatctgtcagatgccaaatgcctgggcgtccatcctgtggtacaacatgctgaccaacaatcccaagaatgtaaacttttttaccaagcccccaattggaacctgggatcaagtggccgaggtcctgagctggcagttctcctccaccaccaagcgaggactgagcatcgagcagctgactacactggcagagaaactcttgggacctggtgtgaattattcagggtgtcagatcacatgggctaaattttgcaaagaaaacatggctggcaagggcttctccttctgggtctggctggacaatatcattgaccttgtgaaaaagtacatcctggccctttggaacgaagggtacatcatgggctttatcagtaaggagcgggagcgggccatcttgagcactaagcctccaggcaccttcctgctaagattcagtgaaagcagcaaagaaggacgcgtcactttcacttgggtggagaaggacatcagcggtaagacccagatccagtccgtggaaccatacacaaagcagcagctgaacaacatgtcatttgctgaaatcatcatgggctataagatcatggatgctaccaatatcctggtgtctccactggtctatctctatcctgacattcccaaggaggaggcattcggaaagtattgtcggccagagagccaggagcatcctgaagctgacccaggcgctgccccatacctgaagaccaagtttatctgtgtgacaccaacgacctgcagcaataccattgacctgccgatgtccccccgcactttagattcattgatgcagtttggaaataatggtgaaggtgctgaaccctcagcaggagggcagtttgagtccctcacctttgacatggagttgacctcggagtgcgctacctcccccatgtga

SEQ ID NO: 386 - DNA, 1110 bp, Homo sapiens
atgttgaagccatcattaccattcacatccctcttattcctgcagctgcccctgctgggagtggggctgaacacgacaattctgacgcccaatgggaatgaagacaccacagctgatttcttcctgaccactatgcccactgactccctcagtgtttccactctgcccctcccagaggttcagtgttttgtgttcaatgtcgagtacatgaattgcacttggaacagcagctctgagccccagcctaccaacctcactctgcattattggtacaagaactcggataatgataaagtccagaagtgcagccactatctattctctgaagaaatcacttctggctgtcagttgcaaaaaaaggagatccacctctaccaaacatttgttgttcagctccaggacccacgggaacccaggagacaggccacacagatgctaaaactgcagaatctggtgatcccctgggctccagagaacctaacacttcacaaactgagtgaatcccagctagaactgaactggaacaacagattcttgaaccactgtttggagcacttggtgcagtaccggactgactgggaccacagctggactgaacaatcagtggattatagacataagttctccttgcctagtgtggatgggcagaaacgctacacgtttcgtgttcggagccgctttaacccactctgtggaagtgctcagcattggagtgaatggagccacccaatccactgggggagcaatacttcaaaagagaatcctttcctgtttgcattggaagccgtggttatctctgttggctccatgggattgattatcagccttctctgtgtgtatttctggctggaacggacgatgccccgaattcccaccctgaagaacctagaggatcttgttactgaataccacgggaacttttcggcctggagtggtgtgtctaagggactggctgagagtctgcagccagactacagtgaacgactctgcctcgtcagtgagattcccccaaaaggaggggcccttggggaggggcctggggcctccccatgcaaccagcatagcccctactgggcccccccatgttacaccctaaagcctgaaacctga

SEQ ID NO: 387 - DNA, 1110 bp, Homo sapiens
atgttgaagccatcattaccattcacatccctcttattcctgcagctgcccctgctgggagtggggctgaacacgacaattctgacgcccaatgggaatgaagacaccacagctgatttcttcctgaccactatgcccactgactccctcagtgtttccactctgcccctcccagaggttcagtgttttgtgttcaatgtcgagtacatgaattgcacttggaacagcagctctgagccccagcctaccaacctcactctgcattattggtacaagaactcggataatgataaagtccagaagtgcagccactatctattctctgaagaaatcacttctggctgtcagttgcaaaaaaaggagatccacctctaccaaacatttgttgttcagctccaggacccacgggaacccaggagacaggccacacagatgctaaaactgcagaatctggtgatcccctgggctccagagaacctaacacttcacaaactgagtgaatcccagctagaactgaactggaacaacagattcttgaaccactgtttggagcacttggtgcagtaccggactgactgggaccacagctggactgaacaatcagtggattatagacataagttctccttgcctagtgtggatgggcagaaacgctacacgtttcgtgttcggagccgctttaacccactctgtggaagtgctcagcattggagtgaatggagccacccaatccactgggggagcaatacttcaaaagagaatcctttcctgtttgcattggaagccgtggttatctctgttggctccatgggattgattatcagccttctctgtgtgtatttctggctggaacggacgatgccccgaattcccaccctgaagaacctagaggatcttgttactgaataccacgggaacttttcggcctggagtggtgtgtctgagggactggctgagagtctgcagccagactacagtgaacgactctgcctcgtcagtgagattcccccaaaaggaggggcccttggggaggggcctggggcctccccatgcaaccagcatagcccctactgggcccccccatgttacaccctaaagcctgaaacctga

SEQ ID NO: 388 - DNA, 2301 bp, Homo sapiens
atggcggcgctgagcggtggcggtggtggcggcgcggagccgggccaggctctgttcaacggggacatggagcccgaggccggcgccggcgccggcgccgcggcctcttcggctgcggaccctgccattccggaggaggtgtggaatatcaaacaaatgattaagttgacacaggaacatatagaggccctattggacaaatttggtggggagcataatccaccatcaatatatctggaggcctatgaagaatacaccagcaagctagatgcactccaacaaagagaacaacagttattggaatctctggggaacggaactgatttttctgtttctagctctgcatcaatggataccgttacatcttcttcctcttctagcctttcagtgctaccttcatctctttcagtttttcaaaatcccacagatgtggcacggagcaaccccaagtcaccacaaaaacctatcgttagagtcttcctgcccaacaaacagaggacagtggtacctgcaaggtgtggagttacagtccgagacagtctaaagaaagcactgatgatgagaggtctaatcccagagtgctgtgctgtttacagaattcaggatggagagaagaaaccaattggttgggacactgatatttcctggcttactggagaagaattgcatgtggaagtgttggagaatgttccacttacaacacacaactttgtacgaaaaacgtttttcaccttagcattttgtgacttttgtcgaaagctgcttttccagggtttccgctgtcaaacatgtggttataaatttcaccagcgttgtagtacagaagttccactgatgtgtgttaattatgaccaacttgatttgctgtttgtctccaagttctttgaacaccacccaataccacaggaagaggcgtccttagcagagactgccctaacatctggatcatccccttccgcacccgcctcggactctattgggccccaaattctcaccagtccgtctccttcaaaatccattccaattccacagcccttccgaccagcagatgaagatcatcgaaatcaatttgggcaacgagaccgatcctcatcagctcccaatgtgcatataaacacaatagaacctgtcaatattgatgacttgattagagaccaaggatttcgtggtgatggaggatcaaccacaggtttgtctgctaccccccctgcctcattacctggctcactaactaacgtgaaagccttacagaaatctccaggacctcagcgagaaaggaagtcatcttcatcctcagaagacaggaatcgaatgaaaacacttggtagacgggactcgagtgatgattgggagattcctgatgggcagattacagtgggacaaagaattggatctggatcatttggaacagtctacaagggaaagtggcatggtgatgtggcagtgaaaatgttgaatgtgacagcacctacacctcagcagttacaagccttcaaaaatgaagtaggagtactcaggaaaacacgacatgtgaatatcctactcttcatgggctattccacaaagccacaactggctattgttacccagtggtgtgagggctccagcttgtatcaccatctccatatcattgagaccaaatttgagatgatcaaacttatagatattgcacgacagactgcacagggcatggattacttacacgccaagtcaatcatccacagagacctcaagagtaataatatatttcttcatgaagacctcacagtaaaaataggtgattttggtctagctacagtgaaatctcgatggagtgggtcccatcagtttgaacagttgtctggatccattttgtggatggcaccagaagtcatcagaatgcaagataaaaatccatacagctttcagtcagatgtatatgcatttggaattgttctgtatgaattgatgactggacagttaccttattcaaacatcaacaacagggaccagataatttttatggtgggacgaggatacctgtctccagatctcagtaaggtacggagtaactgtccaaaagccatgaagagattaatggcagagtgcctcaaaaagaaaagagatgagagaccactctttccccaaattctcgcctctattgagctgctggcccgctcattgccaaaaattcaccgcagtgcatcagaaccctccttgaatcgggctggtttccaaacagaggattttagtctatatgcttgtgcttctccaaaaacacccatccaggcagggggatatggtgcgtttcctgtccactga

SEQ ID NO: 389 - DNA, 2301 bp, Homo sapiens
atggcggcgctgagcggtggcggtggtggcggcgcggagccgggccaggctctgttcaacggggacatggagcccgaggccggcgccggcgccggcgccgcggcctcttcggctgcggaccctgccattccggaggaggtgtggaatatcaaacaaatgattaagttgacacaggaacatatagaggccctattggacaaatttggtggggagcataatccaccatcaatatatctggaggcctatgaagaatacaccagcaagctagatgcactccaacaaagagaacaacagttattggaatctctggggaacggaactgatttttctgtttctagctctgcatcaatggataccgttacatcttcttcctcttctagcctttcagtgctaccttcatctctttcagtttttcaaaatcccacagatgtggcacggagcaaccccaagtcaccacaaaaacctatcgttagagtcttcctgcccaacaaacagaggacagtggtacctgcaaggtgtggagttacagtccgagacagtctaaagaaagcactgatgatgagaggtctaatcccagagtgctgtgctgtttacagaattcaggatggagagaagaaaccaattggttgggacactgatatttcctggcttactggagaagaattgcatgtggaagtgttggagaatgttccacttacaacacacaactttgtacgaaaaacgtttttcaccttagcattttgtgacttttgtcgaaagctgcttttccagggtttccgctgtcaaacatgtggttataaatttcaccagcgttgtagtacagaagttccactgatgtgtgttaattatgaccaacttgatttgctgtttgtctccaagttctttgaacaccacccaataccacaggaagaggcgtccttagcagagactgccctaacatctggatcatccccttccgcacccgcctcggactctattgggccccaaattctcaccagtccgtctccttcaaaatccattccaattccacagcccttccgaccagcagatgaagatcatcgaaatcaatttgggcaacgagaccgatcctcatcagctcccaatgtgcatataaacacaatagaacctgtcaatattgatgacttgattagagaccaaggatttcgtggtgatggaggatcaaccacaggtttgtctgctaccccccctgcctcattacctggctcactaactaacgtgaaagccttacagaaatctccaggacctcagcgagaaaggaagtcatcttcatcctcagaagacaggaatcgaatgaaaacacttggtagacgggactcgagtgatgattgggagattcctgatgggcagattacagtgggacaaagaattggatctggatcatttggaacagtctacaagggaaagtggcatggtgatgtggcagtgaaaatgttgaatgtgacagcacctacacctcagcagttacaagccttcaaaaatgaagtaggagtactcaggaaaacacgacatgtgaatatcctactcttcatgggctattccacaaagccacaactggctattgttacccagtggtgtgagggctccagcttgtatcaccatctccatatcattgagaccaaatttgagatgatcaaacttatagatattgcacgacagactgcacagggcatggattacttacacgccaagtcaatcatccacagagacctcaagagtaataatatatttcttcatgaagacctcacagtaaaaataggtgattttggtctagctacagagaaatctcgatggagtgggtcccatcagtttgaacagttgtctggatccattttgtggatggcaccagaagtcatcagaatgcaagataaaaatccatacagctttcagtcagatgtatatgcatttggaattgttctgtatgaattgatgactggacagttaccttattcaaacatcaacaacagggaccagataatttttatggtgggacgaggatacctgtctccagatctcagtaaggtacggagtaactgtccaaaagccatgaagagattaatggcagagtgcctcaaaaagaaaagagatgagagaccactctttccccaaattctcgcctctattgagctgctggcccgctcattgccaaaaattcaccgcagtgcatcagaaccctccttgaatcgggctggtttccaaacagaggattttagtctatatgcttgtgcttctccaaaaacacccatccaggcagggggatatggtgcgtttcctgtccactga

SEQ ID NO: 390 - DNA, 1794 bp, Homo sapiens
atgggcaagaagcacaagaagcacaaggccgagtggcgctcgtcctacgaggattatgccgacaagcccctggagaagcctctaaagctagtcctgaaggtcggaggaagtgaagtgactgaactctcaggatccggccacgactccagttactatgatgacaggtcagaccatgagcgagagaggcacaaagaaaagaaaaagaagaagaagaagaagtccgagaaggagaagcatctggacgatgaggaaagaaggaagcgaaaggaagagaagaagcggaagcgagagagggagcactgtgacacggagggagaggctgacgactttgatcctgggaagaaggtggaggtggagccgcccccagatcggccagtccgagcgtgccggacacagccagccgaaaatgagagcacacctattcagcaactcctggaacacttcctccgccagcttcagagaaaagatccccatggattttttgcttttcctgtcacggatgcaattgctcctggatattcaatgataataaaacatcccatggattttggcaccatgaaagacaaaattgtagctaatgaatacaagtcagttacggaatttaaggcagatttcaagctgatgtgtgataatgcaatgacatacgctaggccagataccgtgtactacaagttggcgaagaagatccttcacgcaggctttaagatgatgagcaaacaggcagctcttttgggcaatgaagatacagctgttgaggaacctgtccctgaagttgtaccagtacaagtagaaactgccaagaaatccaaaaagccgagtagagaagttatcagctgcatgtttgagcctgaagggaatgcctgcagcttgacggacagtaccgcagaggagcacgtgctggcgctggtggagcacgcagctgacgaagctcgggacaggatcaaccggttcctcccaggcggcaagatgggctatctgaagaggaacggggacgggagcctgctctacagcgtggtcaacacggccgagccggacgctgatgaggaggagacccacccggtggacttgagctcgctctccagtaagctactcccaggcttcaccacgctgggcttcaaagacgagagaagaaacaaagtcacctttctctccagtgccactactgcgctttcgatgcagaataattcagtatttggcgacttgaagtcggacgagatggagctgctctactcagcctacggagatgagacaggcgtgcagtgtgcgctgagcctgcaggagtttgtgaaggatgctgggagctacagcaagaaagtggtggacgacctcctggaccagatcacaggcggagaccactctaggacgctcttccagctgaagcagagaagaaatgttcccatgaagcctccagatgaagccaaggttggggacaccctaggagacagcagcagctctgttctggagttcatgtcgatgaagtcctatcccgacgtttctgtggatatctccatgctcagctctctggggaaggtgaagaaggagctggaccctgacgacagccatttgaacttggatgagacgacgaagctcctgcaggacctgcacgaagcacaggcggagcgcggcggctctcggccgtcgtccaacctcagctccctgtccaacgcctccgagagggaccagcaccacctgggaagcccttctcgcctgagtgtcggggagcagccagacgtcacccacgacccctatgagtttcttcagtctccagagcctgcggcctctgccaagacctaa

SEQ ID NO: 391 - DNA, 1794 bp, Homo sapiens
atgggcaagaagcacaagaagcacaaggccgagtggcgctcgtcctacgaggattatgccgacaagcccctggagaagcctctaaagctagtcctgaaggtcggaggaagtgaagtgactgaactctcaggatccggccacgactccagttactatgatgacaggtcagaccatgagcgagagaggcacaaagaaaagaaaaagaagaagaagaagaagtccgagaaggagaagcatctggacgatgaggaaagaaggaagcgaaaggaagagaagaagcggaagcgagagagggagcactgtgacacggagggagaggctgacgactttgatcctgggaagaaggtggaggtggagccgcccccagatcggccagtccgagcgtgccggacacagccagccgaaaatgagagcacacctattcagcaactcctggaacacttcctccgccagcttcagagaaaagatccccatggattttttgcttttcctgtcacggatgcaattgctcctggatattcaatgataataaaacatcccatggattttggcaccatgaaagacaaaattgtagctaatgaatacaagtcagttacggaatttaaggcagatttcaagctgatgtgtgataatgcaatgacatacaataggccagataccgtgtactacaagttggcgaagaagatccttcacgcaggctttaagatgatgagcaaacaggcagctcttttgggcaatgaagatacagctgttgaggaacctgtccctgaagttgtaccagtacaagtagaaactgccaagaaatccaaaaagccgagtagagaagttatcagctgcatgtttgagcctgaagggaatgcctgcagcttgacggacagtaccgcagaggagcacgtgctggcgctggtggagcacgcagctgacgaagctcgggacaggatcaaccggttcctcccaggcggcaagatgggctatctgaagaggaacggggacgggagcctgctctacagcgtggtcaacacggccgagccggacgctgatgaggaggagacccacccggtggacttgagctcgctctccagtaagctactcccaggcttcaccacgctgggcttcaaagacgagagaagaaacaaagtcacctttctctccagtgccactactgcgctttcgatgcagaataattcagtatttggcgacttgaagtcggacgagatggagctgctctactcagcctacggagatgagacaggcgtgcagtgtgcgctgagcctgcaggagtttgtgaaggatgctgggagctacagcaagaaagtggtggacgacctcctggaccagatcacaggcggagaccactctaggacgctcttccagctgaagcagagaagaaatgttcccatgaagcctccagatgaagccaaggttggggacaccctaggagacagcagcagctctgttctggagttcatgtcgatgaagtcctatcccgacgtttctgtggatatctccatgctcagctctctggggaaggtgaagaaggagctggaccctgacgacagccatttgaacttggatgagacgacgaagctcctgcaggacctgcacgaagcacaggcggagcgcggcggctctcggccgtcgtccaacctcagctccctgtccaacgcctccgagagggaccagcaccacctgggaagcccttctcgcctgagtgtcggggagcagccagacgtcacccacgacccctatgagtttcttcagtctccagagcctgcggcctctgccaagacctaa

SEQ ID NO: 392 - DNA, 1635 bp, Homo sapiens
atgatgacaggtcagaccatgagcgagagaggcacaaagaaaagaaaaagaagaagaagaagaagtccgagaaggagaagcatctggacgatgaggaaagaaggaagcgaaaggaagagaagaagcggaagcgagagagggagcactgtgacacggagggagaggctgacgactttgatcctgggaagaaggtggaggtggagccgcccccagatcggccagtccgagcgtgccggacacagccagccgaaaatgagagcacacctattcagcaactcctggaacacttcctccgccagcttcagagatccccatggattttttgcttttcctgtcacggatgcaattgctcctggatattcaatgataataaaacatcccatggattttggcaccatgaaagacaaaattgtagctaatgaatacaagtcagttacggaatttaaggcagatttcaagctgatgtgtgataatgcaatgacatacaataggccagataccgtgtactacaagttggcgaagaagatccttcacgcaggctttaagatgatgagcaaacaggcagctcttttgggcaatgaagatacagctgttgaggaacctgtccctgaagttgtaccagtacaagtagaaactgccaagaaatccaaaaagccgagtagagaagttatcagctgcatgtttgagcctgaagggaatgcctgcagcttgacggacagtaccgcagaggagcacgtgctggcgctggtggagcacgcagctgacgaagctcgggacaggatcaaccggttcctcccaggcggcaagatgggctatctgaagaggaacggggacgggagcctgctctacagcgtggtcaacacggccgagccggacgctgatgaggaggagacccacccggtggacttgagctcgctctccagtaagctactcccaggcttcaccacgctgggcttcaaagacgagagaagaaacaaagtcacctttctctccagtgccactactgcgctttcgatgcagaataattcagtatttggcgacttgaagtcggacgagatggagctgctctactcagcctacggagatgagacaggcgtgcagtgtgcgctgagcctgcaggagtttgtgaaggatgctgggagctacagcaagaaagtggtggacgacctcctggaccagatcacaggcggagaccactctaggacgctcttccagctgaagcagagaagaaatgttcccatgaagcctccagatgaagccaaggttggggacaccctaggagacagcagcagctctgttctggagttcatgtcgatgaagtcctatcccgacgtttctgtggatatctccatgctcagctctctggggaaggtgaagaaggagctggaccctgacgacagccatttgaacttggatgagacgacgaagctcctgcaggacctgcacgaagcacaggcggagcgcggcggctctcggccgtcgtccaacctcagctccctgtccaacgcctccgagagggaccagcaccacctgggaagcccttctcgcctgagtgtcggggagcagccagacgtcacccacgacccctatgagtttcttcagtctccagagcctgcggcctctgccaagacctaa

SEQ ID NO: 393 - DNA, 1635 bp, Homo sapiens
atgatgacaggtcagaccatgagcgagagaggcacaaagaaaagaaaaagaagaagaagaagaagtccgagaaggagaagcatctggacgatgaggaaagaaggaagcgaaaggaagagaagaagcggaagcgagagagggagcactgtgacacggagggagaggctgacgactttgatcctgggaagaaggtggaggtggagccgcccccagatcggccagtccgagcgtgccggacacagccagccgaaaatgagagcacacctattcagcaactcctggaacacttcctccgccagcttcagagatccccatggattttttgcttttcctgtcacggatgcaattgctcctggatattcaatgataataaaacatcccatggattttggcaccatgaaagacaaaattgtagctaatgaatacaagtcagttacggaatttaaggcagatttcaagctgatgtgtgataatgcaatgacatacaataggccagataccgtgtactacaagttggcgaagaagatccttcacgcaggctttaagatgatgagcaaacaggcagctcttttgggcaatgaagatacagctgttgaggaacctgtccctgaagttgtaccagtacaagtagaaactgccaagaaatccaaaaagccgagtagagaagttatcagctgcatgtttgagcctgaagggaatgcctgcagcttgacggacagtaccgcagaggagcacgtgctggcgctggtggagcacgcagctgacgaagctcgggacaggatcaaccggttcctcccaggcggcaagatgggctatctgaagaggaacggggacgggagcctgctctacagcgtggtcaacacggccgagccggacgctgatgaggaggagacccacccggtggacttgagctcgctctccagtaagctactcccaggcttcaccacgctgggcttcaaagacgagagaagaaacaaagtcacctttctctccagtgccactactgcgctttcgatgcagaataattcagtatttggcgacttgaagtcggacgagatggagctgctctactcagcctacggagatgagacaggcgtgcagtgtgcgctgagcctgcaggagtttgtgaaggatgctgggagctacagcaagaaagtggtggacgacctcctggaccagatcacaggcggagaccactctaggacgctcttccagctgaagcagagaagaaatgttcccatgaagcctccagatgaagccaaggttggggacaccctaggagacagcagcagctctgttctggagttcatgtcgatgaagtcctatcccgacgtttctgtggatatctccatgctcagctctctggggaaggtgaagaaggagctggaccctgacgacagccatttgaacttggatgagacgacgaagctcctgcacgacctgcacgaagcacaggcggagcgcggcggctctcggccgtcgtccaacctcagctccctgtccaacgcctccgagagggaccagcaccacctgggaagcccttctcgcctgagtgtcggggagcagccagacgtcacccacgacccctatgagtttcttcagtctccagagcctgcggcctctgccaagacctaa

SEQ ID NO: 394 - DNA, 2256 bp, Homo sapiens
atgggccagactgggaagaaatctgagaagggaccagtttgttggcggaagcgtgtaaaatcagagtacatgcgactgagacagctcaagaggttcagacgagctgatgaagtaaagagtatgtttagttccaatcgtcagaaaattttggaaagaacggaaatcttaaaccaagaatggaaacagcgaaggatacagcctgtgcacatcctgacttctgtgagctcattgcgcgggactagggagtgttcggtgaccagtgacttggattttccaacacaagtcatcccattaaagactctgaatgcagttgcttcagtacccataatgtattcttggtctcccctacagcagaattttatggtggaagatgaaactgttttacataacattccttatatgggagatgaagttttagatcaggatggtactttcattgaagaactaataaaaaattatgatgggaaagtacacggggatagagaatgtgggtttataaatgatgaaatttttgtggagttggtgaatgcccttggtcaatataatgatgatgacgatgatgatgatggagacgatcctgaagaaagagaagaaaagcagaaagatctggaggatcaccgagatgataaagaaagccgcccacctcggaaatttccttctgataaaatttttgaagccatttcctcaatgtttccagataagggcacagcagaagaactaaaggaaaaatataaagaactcaccgaacagcagctcccaggcgcacttcctcctgaatgtacccccaacatagatggaccaaatgctaaatctgttcagagagagcaaagcttacactcctttcatacgcttttctgtaggcgatgttttaaatatgactgcttcctacatcgtaagtgcaattattcttttcatgcaacacccaacacttataagcggaagaacacagaaacagctctagacaacaaaccttgtggaccacagtgttaccagcatttggagggagcaaaggagtttgctgctgctctcaccgctgagcggataaagaccccaccaaaacgtccaggaggccgcagaagaggacggcttcccaataacagtagcaggcccagcacccccaccattaatgtgctggaatcaaaggatacagacagtgatagggaagcagggactgaaacggggggagagaacaatgataaagaagaagaagagaagaaagatgaaacttcgagctcctctgaagcaaattctcggtgtcaaacaccaataaagatgaagccaaatattgaacctcctgagaatgtggagtggagtggtgctgaagcctcaatgtttagagtcctcattggcacttactatgacaatttctgtgccattgctaggttaattgggaccaaaacatgtagacaggtgtatgagtttagagtcaaagaatctagcatcatagctccagctcccgctgaggatgtggatactcctccaaggaaaaagaagaggaaacaccggttgtgggctgcacactgcagaaagatacagctgaaaaaggacggctcctctaaccatgtttacaactatcaaccctgtgatcatccacggcagccttgtgacagttcgtgcccttgtgtgatagcacaaaatttttgtgaaaagttttgtcaatgtagttcagagtgtcaaaaccgctttccgggatgccgctgcaaagcacagtgcaacaccaagcagtgcccgtgctacctggctgtccgagagtgtgaccctgacctctgtcttacttgtggagccgctgaccattgggacagtaaaaatgtgtcctgcaagaactgcagtattcagcggggctccaaaaagcatctattgctggcaccatctgacgtggcaggctgggggatttttatcaaagatcctgtgcagaaaaatgaattcatctcagaatactgtggagagattatttctcaagatgaagctgacagaagagggaaagtgtatgataaatacatgtgcagctttctgttcaacttgaacaatgattttgtggtggatgcaacccgcaagggtaacaaaattcgttttgcaaatcattcggtaaatccaaactgctatgcaaaagttatgatggttaacggtgatcacaggataggtatttttgccaagagagccatccagactggcgaagagctgttttttgattacagatacagccaggctgatgccctgaagtatgtcggcatcgaaagagaaatggaaatcccttga

SEQ ID NO: 395 - DNA, 3159 bp, Homo sapiens
atggaaaacctggaatcaaggctcaagaatgccccctattttcgttgtgagaagggaaccgattccatccctctatgccggaagtgtgagacgtgtgtcttagcctggaagatcttctctaccaaagagtggttctgcaggatcaatgacatatcacagaggaggtttctagttggcattctgaagcagttaaatagcttatatttgttacactatttccaaaatatccttcagaccacacagggaaaggatttcatctataacaggtcccggatcaacctcagcaagaaagaggggaaagttgtgaagtcctccttgaaccaaatgttggataaaacagtagaacagaagatgaaagagatcttgtactggtttgcgaacagcacccagtggaccaaggcgaattatactctcttactgctgcagatgtgcaaccccaaattactgctcactgctgccaatgtgatcagagtcctgtttctgagagaggagaacaatatctcagggctcaatcaagacatcacagatgtgtgtttttcccctgagaaagaccacagctccaagtctgcgacctcacaagtctattggacagccaaaactcagcacacatcccttcctttgtccaaagccccagaaaatgaacacttgcttggggcagcatctaaccctgaggaaccatggaggaattcactccggtgtatatccgaaatgaataggctgttttctggaaaaggagacataaccaagccagggtacgatccctgcaatctattggttgacctggatgacatcagagacctgtcttctgggttcagcaaataccgagacttcatccgttacctgcccatccacctctccaagtacattctaagaatgctggatagacacaccctgaacaagtgcgcctctgtgagccagcactgggccgccatggctcaacaggtcaagatggacttgtcagcgcacggcttcattcagaaccagattaccttcttgcaggggtcctacacaagaggaattgatcctaattatgccaataaggtttctatcccagttcctaaaatggtagatgacgggaagagcatgcgtgtgaaacatccgaagtggaagctgagaacgaagaatgagtacaacctgtggactgcataccagaacgaggaaacgcagcaggtcctgatagaggagagaaatgttttctgtgggacctacaatgttcgcattctctctgacacgtgggatcaaaaccgagtcatccactattccgggggagatctgatagctgtgtcatctaatcgaaagatccatcttctggacatcatacaagtgaaagcgatacccgttgaattccgaggccatgctgggagtgtccgggccctcttcctgtgtgaggaggaaaactttctcctaagcgggagctatgacctaagtatcagatactgggatctgaaaagtggggtttgcacacgaatcttcggtggtcaccaggggactatcacttgcatggacttgtgtaagaacaggctcgtatctggaggaagagattgccaggtaaaagtatgggatgtagacacagggaagtgcctgaagacgtttagacacaaagaccccatcttggccaccaggatcaatgatacctacattgtgagcagctgtgagcgagggctggtgaaagtgtggcacattgccatggcccagttggtaaagactctcagtggccatgagggagccgtgaaatgcctgttctttgaccagtggcatctcctctcaggaagtactgatggcctggtcatggcctggagcatggtggggaagtacgagcgctgcctgatggccttcaagcatcccaaggaggtgctcgacgtgtcccttctcttcctccgggtcatcagcgcctgtgcagatggcaagatccgaatttacaatttcctcaacgggaactgtatgaaggtgttaaaagccaatggcagaggtgatcctgtgctgtccttctttattcagggcaacaggatggtggtcaacacagagagcaatgttctcatgttccagtttgagcacataaagtggcagtatgccgtggaaaaaacgaaacaaaagaagaataaggagaaagaggaggaaaaagaagaaaatagtctcatggaaattctctctaagtgtaatattcaggttcacagcccaagagagtctgtatccagtaaacaaactgtgatccaagagctcctaccaggcaaacctcccaagtcccgagtactcctgaagccggccaagttctcttcagcagtgttaatagaggaacttcaaagtcaaggaaagtcaaaatcaccccgaagagatgcagatgatgtggagaaagcacaaaaacaaggacaattggaaactcctggaaaactgcccagtcacccaaagaaaaagtcttggaaaatccctatgtcacctgaccaattcctcctgactgttagcgccctgcagcacgcccataattccggggaatttgcctatccctgtaggccccaaacagaaattactgatgtctggggaccttcaatttcatacccaaggaaggtcttgaatttcaaaggaaaatcaatccaacgtgcagttgatcggttgagattgagcaatcctcctatagatgtgaaacgaaccagtattccccttgaaatccagaaactgcagcccaacttgaagatctctttgcacagtcctagagtccagtccaccataccccagcccatgattatccgctccaggttctctggcagcttaaagggtggagaccaagtgaccagttcaattgaaagggctgtgtgcagtacgggtcccctgaccagtatgcaggtcattaaaccaaaccgcatgctagctccacaagtgggcacagccaccctgtctcttaagaaagaacggcctcgcatctatacagcccttgatccttttagagtgaacactgagttcgtgctgttgaccgtgaaggaggagaaggagcaccaggaagccaagatgaaggaatatcaggccagggagtccactggagtggttgatccaggaaaagtcagcaaagctgcatggatcaggaagatcaaaggcctgcctattgataatttcacgaagcaagggaaaacagcggcccctgaacttggacaaaatgtatttatctaa

SEQ ID NO: 396 - DNA, 3159 bp, Homo sapiens
atggaaaacctggaatcaaggctcaagaatgccccctattttcgttgtgagaagggaaccgattccatccctctatgccggaagtgtgagacgtgtgtcttagcctggaagatcttctctaccaaagagtggttctgcaggatcaatgacatatcacagaggaggtttctagttggcattctgaagcagttaaatagcttatatttgttacactatttccaaaatatccttcagaccacacagggaaaggatttcatctataacaggtcccggatcaacctcagcaagaaagaggggaaagttgtgaagtcctccttgaaccaaatgttggataaaacagtagaacagaagatgaaagagatcttgtactggtttgcgaacagcacccagtggaccaaggcgaattatactctcttactgctgcagatgtgcaaccccaaattactgctcactgctgccaatgtgatcagagtcctgtttctgagagaggagaacaatatctcagggctcaatcaagacatcacagatgtgtgtttttcccctgagaaagaccacagctccaagtctgcgacctcacaagtctattggacagccaaaactcagcacacatcccttcctttgtccaaagccccagaaaatgaacacttgcttggggcagcatctaaccctgaggaaccatggaggaattcactccggtgtatatccgaaatgaataggctgttttctggaaaaggagacataaccaagccagggtacgatccctgcaatctattggttgacctggatgacatcagagacctgtcttctgggttcagcaaataccgagacttcatccgttacctgcccatccacctctccaagtacattctaagaatgctggatagacacaccctgaacaagtgcgcctctgtgagccagcactgggccgccatggctcaacaggtcaagatgaacttgtcagcgcacggcttcattcagaaccagattaccttcttgcaggggtcctacacaagaggaattgatcctaattatgccaataaggtttctatcccagttcctaaaatggtagatgacgggaagagcatgcgtgtgaaacatccgaagtggaagctgagaacgaagaatgagtacaacctgtggactgcataccagaacgaggaaacgcagcaggtcctgatagaggagagaaatgttttctgtgggacctacaatgttcgcattctctctgacacgtgggatcaaaaccgagtcatccactattccgggggagatctgatagctgtgtcatctaatcgaaagatccatcttctggacatcatacaagtgaaagcgatacccgttgaattccgaggccatgctgggagtgtccgggccctcttcctgtgtgaggaggaaaactttctcctaagcgggagctatgacctaagtatcagatactgggatctgaaaagtggggtttgcacacgaatcttcggtggtcaccaggggactatcacttgcatggacttgtgtaagaacaggctcgtatctggaggaagagattgccaggtaaaagtatgggatgtagacacagggaagtgcctgaagacgtttagacacaaagaccccatcttggccaccaggatcaatgatacctacattgtgagcagctgtgagcgagggctggtgaaagtgtggcacattgccatggcccagttggtaaagactctcagtggccatgagggagccgtgaaatgcctgttctttgaccagtggcatctcctctcaggaagtactgatggcctggtcatggcctggagcatggtggggaagtacgagcgctgcctgatggccttcaagcatcccaaggaggtgctcgacgtgtcccttctcttcctccgggtcatcagcgcctgtgcagatggcaagatccgaatttacaatttcctcaacgggaactgtatgaaggtgttaaaagccaatggcagaggtgatcctgtgctgtccttctttattcagggcaacaggatggtggtcaacacagagagcaatgttctcatgttccagtttgagcacataaagtggcagtatgccgtggaaaaaacgaaacaaaagaagaataaggagaaagaggaggaaaaagaagaaaatagtctcatggaaattctctctaagtgtaatattcaggttcacagcccaagagagtctgtatccagtaaacaaactgtgatccaagagctcctaccaggcaaacctcccaagtcccgagtactcctgaagccggccaagttctcttcagcagtgttaatagaggaacttcaaagtcaaggaaagtcaaaatcaccccgaagagatgcagatgatgtggagaaagcacaaaaacaaggacaattggaaactcctggaaaactgcccagtcacccaaagaaaaagtcttggaaaatccctatgtcacctgaccaattcctcctgactgttagcgccctgcagcacgcccataattccggggaatttgcctatccctgtaggccccaaacagaaattactgatgtctggggaccttcaatttcatacccaaggaaggtcttgaatttcaaaggaaaatcaatccaacgtgcagttgatcggttgagattgagcaatcctcctatagatgtgaaacgaaccagtattccccttgaaatccagaaactgcagcccaacttgaagatctctttgcacagtcctagagtccagtccaccataccccagcccatgattatccgctccaggttctctggcagcttaaagggtggagaccaagtgaccagttcaattgaaagggctgtgtgcagtacgggtcccctgaccagtatgcaggtcattaaaccaaaccgcatgctagctccacaagtgggcacagccaccctgtctcttaagaaagaacggcctcgcatctatacagcccttgatccttttagagtgaacactgagttcgtgctgttgaccgtgaaggaggagaaggagcaccaggaagccaagatgaaggaatatcaggccagggagtccactggagtggttgatccaggaaaagtcagcaaagctgcatggatcaggaagatcaaaggcctgcctattgataatttcacgaagcaagggaaaacagcggcccctgaacttggacaaaatgtatttatctaa

SEQ ID NO: 397 - DNA, 1632 bp, Homo sapiens
atgtctcgggagtcggatgttgaggctcagcagtctcatggcagcagtgcctgttcacagccccatggcagcgttacccagtcccaaggctcctcctcacagtcccagggcatatccagctcctctaccagcacgatgccaaactccagccagtcctctcactccagctctgggacactgagctccttagagacagtgtccactcaggaactctattctattcctgaggaccaagaacctgaggaccaagaacctgaggagcctacccctgccccctgggctcgattatgggcccttcaggatggatttgccaatcttgaatgtgtgaatgacaactactggtttgggagggacaaaagctgtgaatattgctttgatgaaccactgctgaaaagaacagataaataccgaacatacagcaagaaacactttcggattttcagggaagtgggtcctaaaaactcttacattgcatacatagaagatcacagtggcaatggaacctttgtaaatacagagcttgtagggaaaggaaaacgccgtcctttgaataacaattctgaaattgcactgtcactaagcagaaataaagtttttgtcttttttgatctgactgtagatgatcagtcagtttatcctaaggcattaagagatgaatacatcatgtcaaaaactcttggaagtggtgcctgtggagaggtaaagctggctttcgagaggaaaacatgtaagaaagtagccataaagatcatcagcaaaaggaagtttgctattggttcagcaagagaggcagacccagctctcaatgttgaaacagaaatagaaattttgaaaaagctaaatcatccttgcatcatcaagattaaaaacttttttgatgcagaagattattatattgttttggaattgatggaagggggagagctgtttgacaaagtggtggggaataaacgcctgaaagaagctacctgcaagctctatttttaccagatgctcttggctgtgcagtaccttcatgaaaacggtattatacaccgtgacttaaagccagagaatgttttactgtcatctcaagaagaggactgtcttataaagattactgattttgggcactccaagattttgggagagacctctctcatgagaaccttatgtggaacccccacctacttggcgcctgaagttcttgtttctgttgggactgctgggtataaccgtgctgtggactgctggagtttaggagttattctttttatctgccttagtgggtatccacctttctctgagcataggactcaagtgtcactgaaggatcagatcaccagtggaaaatacaacttcattcctgaagtctgggcagaagtctcagagaaagctctggaccttgtcaagaagttgttggtagtggatccaaaggcacgttttacgacagaagaagccttaagacacccgtggcttcaggatgaagacatgaagagaaagtttcaagatcttctgtctgaggaaaatgaatccacagctctaccccaggttctagcccagccttctactagtcgaaagcggccccgtgaaggggaagccgagggtgccgagaccacaaagcgcccagctgtgtgtgctgctgtgttgtga

SEQ ID NO: 398 - DNA, 5268 bp, Homo sapiens
atgctctcagcaacccccctgtatgggaacgttcacagctggatgaacagcgagagggtccgcatgtgtggggcgagcgaagacaggaaaatccttgtaaatgatggtgacgcttcaaaagccagactggaactgagggaagagaatcccttgaaccacaacgtggtggatgcgagcacggcccataggatcgatggcctggcagcactgagcatggaccgcactggcctgatccgggaagggctgcgggtcccgggaaacatcgtctattctagcttgtgtggactgggctcagagaaaggtcgggaggctgccacaagcactctaggtggccttgggttttcttcggaaagaaatccagagatgcagttcaaaccgaatacacccgagacagtggaggcttctgccgtctctggaaaacccccaaatggcttcagtgctatatacaaaacaccgcctggaatacaaaaaagtgctgtagccacagcagaagcgctgggcttggacaggcctgccagcgacaaacagagccctctcaacatcaatggtgctagttatctgcggctgccctgggtcaatccttacatggagggtgccacgccagccatctaccctttcctcgactcgccaaataagtattcactgaacatgtacaaggccttgctacctcagcagtcctacagcttggcccagccgctgtattctccagtctgcaccaatggggagcgctttctctacctgccgccacctcactacgtcggtccccacatcccatcgtccttggcatcacccatgaggctctcgacaccttcggcctccccagccatcccgcctctcgtccattgcgcagacaaaagcctcccgtggaagatgggcgtcagccctgggaatcctgttgattcccacgcctatcctcacatccagaacagtaagcagcccagggttccctctgccaaggcggtcaccagtggcctgccgggggacacagctctcctgttgcccccctcgcctcggccgtcaccccgagtccaccttcccacccagcctgctgcagacacctactcggagttccacaagcactatgccaggatctccacctctccttcagttgccctgtcaaagccatacatgacagttagcagcgagttccccgcggccaggctctccaatggcaagtatcccaaggctccggaagggggcgaaggtgcccagccagtgcccgggcatgcccggaagacagcggttcaagacagaaaagatggcagctcacctcctctgttggagaagcagaccgttaccaaagacgtcacagataagccactagacttgtcttctaaagtggtggatgtagatgcttccaaagctgaccacatgaaaaagatggctcccacggtcctggttcacagcagggctggaagtggcttagtgctctccggaagtgagattccgaaagaaacactatctcctccaggaaatggttgtgctatctatagatctgaaatcatcagcactgctccctcatcctgggtggtgcccgggccaagtcctaacgaagagaacaatggcaaaagcatgtcgctgaaaaacaaggcattggactgggcgataccacagcagcggagttcatcatgcccgcgcatgggcggcaccgatgctgtcatcactaacgtttcagggtcagtgtcgagtgcaggccgcccagcctccgcatcacccgcccccaatgccaatgcagatggcaccaaaaccagcaggagctctgtagaaaccacaccatccgttattcagcacgtgggccagcccccggccactcctgccaagcacagtagcagcaccagcagcaagggcgccaaagccagcaacccagaaccgagtttcaaagcaaacgagaacggccttccaccaagctctatatttctgtctccaaatgaggcattcaggtccccaccaattccctaccccaggagttacctcccttacccagcccctgagggcattgctgtaagtcccctctccttacatggcaaaggacctgtctaccctcacccagttttgttacccaatggcagtctgtttcctgggcaccttgccccaaagcctgggctgccctatgggcttcccaccggccgtccagagtttgtgacctaccaagatgccctggggttgggcatggtgcatcccatgttgataccacacacgcccatagagattactaaagaggagaaaccagagaggagatcccggtcccatgagagagcccgttacgaggacccaaccctccggaatcggttttccgagattttggaaactagcagcaccaagttacatccagatgtccccaccgacaagaacctaaagccgaaccccaactggaatcaagggaagactgttgtcaaaagcgacaagcttgtctacgtagaccttctccgagaagaaccagatgctaaaactgacacaaacgtgtccaaacccagctttgcagcagagagtgttggccagagcgctgagccccccaagccctcagttgagccggccctgcagcagcaccgtgatttcatcgccctgagagaggagttggggcgcatcagtgacttccacgaaacttatactttcaaacagccagtcttcaccgtaagcaaggacagtgttctggcaggtaccaacaaagagaacctagggttgccagtctcgactccattcctggagccacctctggggagcgatggccctgctgtaacttttggtaaaacccaagaggatcccaaaccattttgtgtgggcagtgccccaccaagtgtggatgtgacccccacctataccaaagatggagctgatgaggctgaatcaaatgatggcaaagttctgaaaccgaagccatctaagctggcaaagagaatcgccaactcagcgggttacgtgggtgaccgattcaaatgtgtcactaccgaactgtatgcagattccagtcagctcagccgggagcaacgggcattgcagatggaaggattacaagaggacagtattttatgtctacccgctgcttactgtgagcgtgcaatgatgcgcttctcagagttggagatgaaagaaagagaaggtggccacccagcaaccaaagactccgagatgtgcaaattcagcccagccgactgggaaaggttgaaaggaaatcaggacaaaaagccaaagtcggtcaccctggaggaggccattgcagaacagaacgaaagtgagagatgcgagtatagtgttggaaacaagcaccgtgatccctttgaagccccagaggacaaagatcttcctgtggagaagtactttgtggagaggcagcctgtgagcgagcctcccgcagaccaggtggcctcggacatgcctcacagccccaccctccgggtggacaggaaacgcaaagtctcaggtgacagcagccacactgagaccactgcggaggaggtgccagaggaccctctgctgaaagccaaacgccgacgagtctctaaagatgactggcctgagagggaaatgacaaacagttcctctaaccacttagaagacccacattatagtgagctgaccaacctgaaggtgtgcattgaattaacagggctccatcctaaaaaacaacgccacttgctgcaccttagagaacgatgggagcagcaggtgtcggcagcagatggcaaacctggccggcaaagcaggaaggaagtgacccaggccactcagcctgaggccattcctcaggggactaacatcactgaagagaaacctggcaggaaaagggcagaggccaaaggcaacagaagctggtcggaagagtctcttaaacccagtgacaatgaacaaggcttgcctgtgttctccggctctccgcccatgaagagtctttcatccaccagtgcaggcggcaaaaagcaggctcagccaagctgcgcaccagcctccaggccgcctgccaaacagcagaaaattaaagaaaaccagaagacagatgtgctgtgtgcagacgaagaagaggattgccaggctgcctccctgctgcagaaatacaccgacaacagcgagaagccatccgggaagagactgtgcaaaaccaaacacttgatccctcaggagtccaggcggggattgccactgacaggggaatactacgtggagaatgccgatggcaaggtgactgtccggagattcagaaagcggccggagcccagttcggactatgatctgtcaccagccaagcaggagccaaagcccttcgaccgcttgcagcaactgctaccagcctcccagtccacacagctgccatgctcaagttcccctcaggagaccacccagtctcgccctatgccgccggaagcacggagacttattgtcaataagaacgctggcgagacccttctgcagcgggcagccaggcttggctatgaggaagtggtcctgtactgcttagagaacaagatttgtgatgtaaatcatcgggacaacgcaggttactgcgccctgcatgaagcttgtgctaggggctggctcaacattgtgcgacacctccttgaatatggcgctgatgtcaactgtagtgcccaggatggaaccaggcctctgcacgatgctgttgagaacgatcacttggaaattgtccgactacttctctcttatggtgctgaccccaccttggctacgtactcaggtagaaccatcatgaaaatgacccacagtgaacttatggaaaagttcttaacagattatttaaatgacctccagggtcgcaatgatgatgacgccagtggcacttgggacttctatggcagctctgtttgtgaaccagatgatgaaagtggctatgatgttttagccaaccccccaggaccagaagaccaggatgatgatgacgatgcctatagcgatgtgtttgaatttgaattttcagagacccccctcttaccgtgttataacatccaagtatctgtggctcaggggccacgaaactggctactgctttcggatgtccttaagaaattgaaaatgtcctcccgcatatttcgctgcaattttccaaacgtggaaattgtcaccattgcagaggcagaattttatcggcaggtttctgcaagtctcttgttctcttgctccaaagacctggaagccttcaaccctgaaagtaaggagctgttagatctggtggaattcacgaacgaaattcagactctgctgggctcctctgtagagtggctccaccccagtgatctggcctcagacaactactggtga

SEQ ID NO: 399 - DNA, 5268 bp, Homo sapiens
atgctctcagcaacccccctgtatgggaacgttcacagctggatgaacagcgagagggtccgcatgtgtggggcgagcgaagacaggaaaatccttgtaaatgatggtgacgcttcaaaagccagactggaactgagggaagagaatcccttgaaccacaacgtggtggatgcgagcacggcccataggatcgatggcctggcagcactgagcatggaccgcactggcctgatccgggaagggctgcgggtcccgggaaacatcgtctattctagcttgtgtggactgggctcagagaaaggtcgggaggctgccacaagcactctaggtggccttgggttttcttcggaaagaaatccagagatgcagttcaaaccgaatacacccgagacagtggaggcttctgccgtctctggaaaacccccaaatggcttcagtgctatatacaaaacaccgcctggaatacaaaaaagtgctgtagccacagcagaagcgctgggcttggacaggcctgccagcgacaaacagagccctctcaacatcaatggtgctagttatctgcggctgccctgggtcaatccttacatggagggtgccacgccagccatctaccctttcctcgactcgccaaataagtattcactgaacatgtacaaggccttgctacctcagcagtcctacagcttggcccagccgctgtattctccagtctgcaccaatggggagcgctttctctacctgccgccacctcactacgtcggtccccacatcccatcgtccttggcatcacccatgaggctctcgacaccttcggcctccccagccatcccgcctctcgtccattgcgcagacaaaagcctcccgtggaagatgggcgtcagccctgggaatcctgttgattcccacgcctatcctcacatccagaacagtaagcagcccagggttccctctgccaaggcggtcaccagtggcctgccgggggacacagctctcctgttgcccccctcgcctcggccgtcaccccgagtccaccttcccacccagcctgctgcagacacctactcggagttccacaagcactatgccaggatctccacctctccttcagttgccctgtcaaagccatacatgacagttagcagcgagttccccgcggccaggctctccaatggcaagtatcccaaggctccggaagggggcgaaggtgcccagccagtgcccgggcatgcccggaagacagcggttcaagacagaaaagatggcagctcacctcctctgttggagaagcagaccgttaccaaagacgtcacagataagccactagacttgtcttctaaagtggtggatgtagatgcttccaaagctgaccacatgaaaaagatggctcccacggtcctggttcacagcagggctggaagtggcttagtgctctccggaagtgagattccgaaagaaacactatctcctccaggaaatggttgtgctatctatagatctgaaatcatcagcactgctccctcatcctgggtggtgcccgggccaagtcctaacgaagagaacaatggcaaaagcatgtcgctgaaaaacaaggcattggactgggcgataccacagcagcggagttcatcatgcccgcgcatgggcggcaccgatgctgtcatcactaacgtttcagggtcagtgtcgagtgcaggccgcccagcctccgcatcacccgcccccaatgccaatgcagatggcaccaaaaccagcaggagctctgtagaaaccacaccatccgttattcagcacgtgggccagcccccggccactcctgccaagcacagtagcagcaccagcagcaagggcgccaaagccagcaacccagaaccgagtttcaaagcaaacgagaacggccttccaccaagctctatatttctgtctccaaatgaggcattcaggtccccaccaattccctaccccaggagttacctcccttacccagcccctgagggcattgctgtaagtcccctctccttacatggcaaaggacctgtctaccctcacccagttttgttacccaatggcagtctgtttcctgggcaccttgccccaaagcctgggctgccctatgggcttcccaccggccgtccagagtttgtgacctaccaagatgccctggggttgggcatggtgcatcccatgttgataccacacacgcccatagagattactaaagaggagaaaccagagaggagatcccggtcccatgagagagcccgttacgaggacccaaccctccggaatcggttttccgagattttggaaactagcagcaccaagttacatccagatgtccccaccgacaagaacctaaagccgaaccccaactggaatcaagggaagactgttgtcaaaagcgacaagcttgtctacgtagaccttctccgagaagaaccagatgctaaaactgacacaaacgtgtccaaacccagctttgcagcagagagtgttggccagagcgctgagccccccaagccctcagttgagccggccctgcagcagcaccgtgatttcatcgccctgagagaggagttggggcgcatcagtgacttccacgaaacttatactttcaaacagccagtcttcaccgtaagcaaggacagtgttctggcaggtaccaacaaagagaacctagggttgccactctcgactccattcctggagccacctctggggagcgatggccctgctgtaacttttggtaaaacccaagaggatcccaaaccattttgtgtgggcagtgccccaccaagtgtggatgtgacccccacctataccaaagatggagctgatgaggctgaatcaaatgatggcaaagttctgaaaccgaagccatctaagctggcaaagagaatcgccaactcagcgggttacgtgggtgaccgattcaaatgtgtcactaccgaactgtatgcagattccagtcagctcagccgggagcaacgggcattgcagatggaaggattacaagaggacagtattttatgtctacccgctgcttactgtgagcgtgcaatgatgcgcttctcagagttggagatgaaagaaagagaaggtggccacccagcaaccaaagactccgagatgtgcaaattcagcccagccgactgggaaaggttgaaaggaaatcaggacaaaaagccaaagtcggtcaccctggaggaggccattgcagaacagaacgaaagtgagagatgcgagtatagtgttggaaacaagcaccgtgatccctttgaagccccagaggacaaagatcttcctgtggagaagtactttgtggagaggcagcctgtgagcgagcctcccgcagaccaggtggcctcggacatgcctcacagccccaccctccgggtggacaggaaacgcaaagtctcaggtgacagcagccacactgagaccactgcggaggaggtgccagaggaccctctgctgaaagccaaacgccgacgagtctctaaagatgactggcctgagagggaaatgacaaacagttcctctaaccacttagaagacccacattatagtgagctgaccaacctgaaggtgtgcattgaattaacagggctccatcctaaaaaacaacgccacttgctgcaccttagagaacgatgggagcagcaggtgtcggcagcagatggcaaacctggccggcaaagcaggaaggaagtgacccaggccactcagcctgaggccattcctcaggggactaacatcactgaagagaaacctggcaggaaaagggcagaggccaaaggcaacagaagctggtcggaagagtctcttaaacccagtgacaatgaacaaggcttgcctgtgttctccggctctccgcccatgaagagtctttcatccaccagtgcaggcggcaaaaagcaggctcagccaagctgcgcaccagcctccaggccgcctgccaaacagcagaaaattaaagaaaaccagaagacagatgtgctgtgtgcagacgaagaagaggattgccaggctgcctccctgctgcagaaatacaccgacaacagcgagaagccatccgggaagagactgtgcaaaaccaaacacttgatccctcaggagtccaggcggggattgccactgacaggggaatactacgtggagaatgccgatggcaaggtgactgtccggagattcagaaagcggccggagcccagttcggactatgatctgtcaccagccaagcaggagccaaagcccttcgaccgcttgcagcaactgctaccagcctcccagtccacacagctgccatgctcaagttcccctcaggagaccacccagtctcgccctatgccgccggaagcacggagacttattgtcaataagaacgctggcgagacccttctgcagcgggcagccaggcttggctatgaggaagtggtcctgtactgcttagagaacaagatttgtgatgtaaatcatcgggacaacgcaggttactgcgccctgcatgaagcttgtgctaggggctggctcaacattgtgcgacacctccttgaatatggcgctgatgtcaactgtagtgcccaggatggaaccaggcctctgcacgatgctgttgagaacgatcacttggaaattgtccgactacttctctcttatggtgctgaccccaccttggctacgtactcaggtagaaccatcatgaaaatgacccacagtgaacttatggaaaagttcttaacagattatttaaatgacctccagggtcgcaatgatgatgacgccagtggcacttgggacttctatggcagctctgtttgtgaaccagatgatgaaagtggctatgatgttttagccaaccccccaggaccagaagaccaggatgatgatgacgatgcctatagcgatgtgtttgaatttgaattttcagagacccccctcttaccgtgttataacatccaagtatctgtggctcaggggccacgaaactggctactgctttcggatgtccttaagaaattgaaaatgtcctcccgcatatttcgctgcaattttccaaacgtggaaattgtcaccattgcagaggcagaattttatcggcaggtttctgcaagtctcttgttctcttgctccaaagacctggaagccttcaaccctgaaagtaaggagctgttagatctggtggaattcacgaacgaaattcagactctgctgggctcctctgtagagtggctccaccccagtgatctggcctcagacaactactggtga

SEQ ID NO: 400 - DNA, 5268 bp, Homo sapiens
atgctctcagcaacccccctgtatgggaacgttcacagctggatgaacagcgagagggtccgcatgtgtggggcgagcgaagacaggaaaatccttgtaaatgatggtgacgcttcaaaagccagactggaactgagggaagagaatcccttgaaccacaacgtggtggatgcgagcacggcccataggatcgatggcctggcagcactgagcatggaccgcactggcctgatccgggaagggctgcgggtcccgggaaacatcgtctattctagcttgtgtggactgggctcagagaaaggtcgggaggctgccacaagcactctaggtggccttgggttttcttcggaaagaaatccagagatgcagttcaaaccgaatacacccgagacagtggaggcttctgccgtctctggaaaacccccaaatggcttcagtgctatatacaaaacaccgcctggaatacaaaaaagtgctgtagccacagcagaaccgctgggcttggacaggcctgccagcgacaaacagagccctctcaacatcaatggtgctagttatctgcggctgccctgggtcaatccttacatggagggtgccacgccagccatctaccctttcctcgactcgccaaataagtattcactgaacatgtacaaggccttgctacctcagcagtcctacagcttggcccagccgctgtattctccagtctgcaccaatggggagcgctttctctacctgccgccacctcactacgtcggtccccacatcccatcgtccttggcatcacccatgaggctctcgacaccttcggcctccccagccatcccgcctctcgtccattgcgcagacaaaagcctcccgtggaagatgggcgtcagccctgggaatcctgttgattcccacgcctatcctcacatccagaacagtaagcagcccagggttccctctgccaaggcggtcaccagtggcctgccgggggacacagctctcctgttgcccccctcgcctcggccgtcaccccgagtccaccttcccacccagcctgctgcagacacctactcggagttccacaagcactatgccaggatctccacctctccttcagttgccctgtcaaagccatacatgacagttagcagcgagttccccgcggccaggctctccaatggcaagtatcccaaggctccggaagggggcgaaggtgcccagccagtgcccgggcatgcccggaagacagcggttcaagacagaaaagatggcagctcacctcctctgttggagaagcagaccgttaccaaagacgtcacagataagccactagacttgtcttctaaagtggtggatgtagatgcttccaaagctgaccacatgaaaaagatggctcccacggtcctggttcacagcagggctggaagtggcttagtgctctccggaagtgagattccgaaagaaacactatctcctccaggaaatggttgtgctatctatagatctgaaatcatcagcactgctccctcatcctgggtggtgcccgggccaagtcctaacgaagagaacaatggcaaaagcatgtcgctgaaaaacaaggcattggactgggcgataccacagcagcggagttcatcatgcccgcgcatgggcggcaccgatgctgtcatcactaacgtttcagggtcagtgtcgagtgcaggccgcccagcctccgcatcacccgcccccaatgccaatgcagatggcaccaaaaccagcaggagctctgtagaaaccacaccatccgttattcagcacgtgggccagcccccggccactcctgccaagcacagtagcagcaccagcagcaagggcgccaaagccagcaacccagaaccgagtttcaaagcaaacgagaacggccttccaccaagctctatatttctgtctccaaatgaggcattcaggtccccaccaattccctaccccaggagttacctcccttacccagcccctgagggcattgctgtaagtcccctctccttacatggcaaaggacctgtctaccctcacccagttttgttacccaatggcagtctgtttcctgggcaccttgccccaaagcctgggctgccctatgggcttcccaccggccgtccagagtttgtgacctaccaagatgccctggggttgggcatggtgcatcccatgttgataccacacacgcccatagagattactaaagaggagaaaccagagaggagatcccggtcccatgagagagcccgttacgaggacccaaccctccggaatcggttttccgagattttggaaactagcagcaccaagttacatccagatgtccccaccgacaagaacctaaagccgaaccccaactggaatcaagggaagactgttgtcaaaagcgacaagcttgtctacgtagaccttctccgagaagaaccagatgctaaaactgacacaaacgtgtccaaacccagctttgcagcagagagtgttggccagagcgctgagccccccaagccctcagttgagccggccctgcagcagcaccgtgatttcatcgccctgagagaggagttggggcgcatcagtgacttccacgaaacttatactttcaaacagccagtcttcaccgtaagcaaggacagtgttctggcaggtaccaacaaagagaacctagggttgccagtctcgactccattcctggagccacctctggggagcgatggccctgctgtaacttttggtaaaacccaagaggatcccaaaccattttgtgtgggcagtgccccaccaagtgtggatgtgacccccacctataccaaagatggagctgatgaggctgaatcaaatgatggcaaagttctgaaaccgaagccatctaagctggcaaagagaatcgccaactcagcgggttacgtgggtgaccgattcaaatgtgtcactaccgaactgtatgcagattccagtcagctcagccgggagcaacgggcattgcagatggaaggattacaagaggacagtattttatgtctacccgctgcttactgtgagcgtgcaatgatgcgcttctcagagttggagatgaaagaaagagaaggtggccacccagcaaccaaagactccgagatgtgcaaattcagcccagccgactgggaaaggttgaaaggaaatcaggacaaaaagccaaagtcggtcaccctggaggaggccattgcagaacagaacgaaagtgagagatgcgagtatagtgttggaaacaagcaccgtgatccctttgaagccccagaggacaaagatcttcctgtggagaagtactttgtggagaggcagcctgtgagcgagcctcccgcagaccaggtggcctcggacatgcctcacagccccaccctccgggtggacaggaaacgcaaagtctcaggtgacagcagccacactgagaccactgcggaggaggtgccagaggaccctctgctgaaagccaaacgccgacgagtctctaaagatgactggcctgagagggaaatgacaaacagttcctctaaccacttagaagacccacattatagtgagctgaccaacctgaaggtgtgcattgaattaacagggctccatcctaaaaaacaacgccacttgctgcaccttagagaacgatgggagcagcaggtgtcggcagcagatggcaaacctggccggcaaagcaggaaggaagtgacccaggccactcagcctgaggccattcctcaggggactaacatcactgaagagaaacctggcaggaaaagggcagaggccaaaggcaacagaagctggtcggaagagtctcttaaacccagtgacaatgaacaaggcttgcctgtgttctccggctctccgcccatgaagagtctttcatccaccagtgcaggcggcaaaaagcaggctcagccaagctgcgcaccagcctccaggccgcctgccaaacagcagaaaattaaagaaaaccagaagacagatgtgctgtgtgcagacgaagaagaggattgccaggctgcctccctgctgcagaaatacaccgacaacagcgagaagccatccgggaagagactgtgcaaaaccaaacacttgatccctcaggagtccaggcggggattgccactgacaggggaatactacgtggagaatgccgatggcaaggtgactgtccggagattcagaaagcggccggagcccagttcggactatgatctgtcaccagccaagcaggagccaaagcccttcgaccgcttgcagcaactgctaccagcctcccagtccacacagctgccatgctcaagttcccctcaggagaccacccagtctcgccctatgccgccggaagcacggagacttattgtcaataagaacgctggcgagacccttctgcagcgggcagccaggcttggctatgaggaagtggtcctgtactgcttagagaacaagatttgtgatgtaaatcatcgggacaacgcaggttactgcgccctgcatgaagcttgtgctaggggctggctcaacattgtgcgacacctccttgaatatggcgctgatgtcaactgtagtgcccaggatggaaccaggcctctgcacgatgctgttgagaacgatcacttggaaattgtccgactacttctctcttatggtgctgaccccaccttggctacgtactcaggtagaaccatcatgaaaatgacccacagtgaacttatggaaaagttcttaacagattatttaaatgacctccagggtcgcaatgatgatgacgccagtggcacttgggacttctatggcagctctgtttgtgaaccagatgatgaaagtggctatgatgttttagccaaccccccaggaccagaagaccaggatgatgatgacgatgcctatagcgatgtgtttgaatttgaattttcagagacccccctcttaccgtgttataacatccaagtatctgtggctcaggggccacgaaactggctactgctttcggatgtccttaagaaattgaaaatgtcctcccgcatatttcgctgcaattttccaaacgtggaaattgtcaccattgcagaggcagaattttatcggcaggtttctgcaagtctcttgttctcttgctccaaagacctggaagccttcaaccctgaaagtaaggagctgttagatctggtggaattcacgaacgaaattcagactctgctgggctcctctgtagagtggctccaccccagtgatctggcctcagacaactactggtga

SEQ ID NO: 401 - DNA, 4626 bp, Homo sapiens
atgaaggacaaacagaagaagaagaaggagcgcacgtgggccgaggccgcgcgcctggtattagaaaactactcggatgctccaatgacaccaaaacagattctgcaggtcatagaggcagaaggactaaaggaaatgagaagtgggacttcccctctcgcatgcctcaatgctatgctacattccaattcaagaggaggagaggggttgttttataaactgcctggccgaatcagccttttcacgctcaagaaggatgccctgcagtggtctcgccatccagctacagtggagggagaggagccagaggacacggctgatgtggagagctgtgggtctaatgaagccagcactgtgagtggtgaaaacgatgtatctcttgatgaaacatcttcgaacgcatcctgttctacagaatctcagagtcgacctctttccaatcccagggacagctacagagcttcctcacaggcgaacaaacaaaagaaaaagactggggtgatgctgcctcgagttgtcctgactcctctgaaggtaaacggggcccacgtggaatctgcatcagggttctcgggctgccacgccgatggcgagagcggcagcccgtccagcagcagcagcggctctctggccctgggcagcgctgctattcgtggccaggccgaggtcacccaggaccctgccccgctcctgagaggcttccggaagccagccacaggtcaaatgaagcgcaacagaggggaagaaatagattttgagacacctgggtccattcttgtcaacaccaacctccgtgccctgatcaactctcggaccttccatgccttaccatcacacttccagcagcagctcctcttcctcctgcctgaagtagacagacaggtggggacggatggcctgttgcgtctcagcagcagtgcactaaataacgagttttttacccatgcggctcagagctggcgggagcgcctggctgatggtgaatttactcatgagatgcaagtcaggatacgacaggaaatggagaaggaaaagaaggtggaacaatggaaagaaaagttctttgaagactactatggacagaagctgggtttgaccaaagaagagtcattgcagcagaacgtgggccaggaggaggctgaaatcaaaagtggcttgtgtgtcccaggagaatcagtgcgtatacagcgtggtccagccacccgacagcgagatgggcattttaagaaacgctctcggccagatctccgaaccagagccagaaggaatctgtacaaaaaacaggagtcagaacaagcaggggttgctaaggatgcaaaatctgtggcctcagatgttcccctctacaaggatggggaggctaagactgacccagcagggctgagcagtccccatctgccaggcacatcctctgcagcacccgacctggagggtcccgaattcccagttgagtctgtggcttctcggatccaggctgagccagacaacttggcacgtgcctctgcatctccagacagaattcctagcctgcctcaggaaactgtggatcaggaacccaaggatcagaagaggaaatcctttgagcaggcggcctctgcatcctttcccgaaaagaagccccggcttgaagatcgtcagtcctttcgtaacacaattgaaagtgttcacaccgaaaagccacagcccactaaagaggagcccaaagtcccgcccatccggattcaactttcacgtatcaaaccaccctgggtggttaaaggtcagcccacttaccagatatgcccccggatcatccccaccacggagtcctcctgccggggttggactggcgccaggaccctcgcagacattaaagcccgtgctctgcaggtccgaggggcgagaggtcaccactgccatagagaggcggccaccactgccatcggaggggggggtggcccgggtggaggtggcggcggggccaccgatgagggaggtggcagaggcagcagcagtggtgatggtggtgaggcctgtggccaccctgagcccaggggaggcccgagcacccctggaaagtgtacgtcagatctacagcgaacacaactactgccgccttatcctctaaatggggagcatacccaggccggaactgccatgtccagagctaggagagaggacctgccttctctgagaaaggaggaaagctgcctactacagagggctacagttggactcacagatgggctaggagatgcctcccaactccccgttgctcccactggggaccagccatgccaggccttgcccctactgtcctcccaaacctcagtagctgagagattagtggagcagcctcagttgcatccggatgttagaactgaatgtgagtctggcaccacttcctgggaaagtgatgatgaggagcaaggacccaccgttcctgcagacaatggtcccattccgtctctagtgggagatgatacattagagaaaggaactggccaagctcttgacagtcatcccactatgaaggatcctgtaaatgtgacccccagttccacacctgaatcctcaccgactgattgcctgcagaacagagcatttgatgacgaattagggcttggtggctcatgccctcctatgagggaaagtgatactagacaagaaaacttgaaaaccaaggctctcgtttctaacagttctttgcattggatacccatcccatcgaatgatgaggtagtgaaacagcccaaaccagaatccagagaacacataccatctgttgagccccaggttggagaggagtgggagaaagctgctcccacccctcctgcattgcctggggatttgacagctgaggagggtctagatcctcttgacagccttacttcactctggactgtgccatctcgaggaggcagtgacagcaatggcagttactgtcaacaggtggacattgaaaagctgaaaatcaacggagactctgaagcactgagtcctcacggtgagtccacggatacagcctctgactttgaaggtcacctcacggaggacagcagtgaggctgacactagagaagctgcagtgacaaagggatcttcggtggacaaggatgagaaacccaattggaaccaatctgccccactgtccaaggtgaatggtgacatgcgtctggttacaaggacagatgggatggttgctcctcagagctgggtgtctcgagtatgtgcggtccgccaaaagatcccagattccctactgctggccagtactgagtaccagccaagagccgtgtgcctgtccatgcctgggtcctcagtggaggccactaacccacttgtgatgcagttgctgcagggtagcttgcccctagagaaggttcttccaccagcccacgatgacagcatgtcagaatccccacaagtaccacttacaaaagaccagagccatggctcgctacgcatgggatctttacatggtcttggaaaaaacagtggcatggttgatggaagcagccccagttctttaagggctttgaaggagcctcttctgccagatagctgtgaaacaggcactggtcttgccaggattgaggccacccaggctcctggagcaccccaaaagaattgcaaggcagtcccaagttttgactccctccatccagtgacaaatcccattacatcctctaggaaactggaagaaatggattccaaagagcagttctcttcctttagttgtgaagatcagaaggaagtccgtgctatgtcacaggacagtaattcaaatgctgctccaggaaagagcccaggagatcttactacctcgagaacacctcgtttctcatctccaaatgtgatctcctttggtccagagcagacaggtcgggccctgggtgatcagagcaatgttacaggccaagggaagaagctttttggctctgggaatgtggctgcaacccttcagcgccccaggcctgcggacccgatgcctcttcctgctgagatccctccagtttttcccagtgggaagttgggaccaagcacaaactccatgtctggtggggtacagactccaagggaagactgggctccaaagccacatgcctttgttggcagcgtcaagaatgagaagacttttgtggggggtcctcttaaggcaaatgccgagaacaggaaagctactgggcatagtcccctggaactggtgggtcacttggaagggatgccctttgtcatggacttgcccttctggaaattaccccgagagccagggaaggggctcagtgagcctctggagccttcttctctcccctcccaactcagcatcaagcaggcattttatgggaagctttctaaactccaactgagttccaccagctttaattattcctctagctctcccacctttcccaaaggccttgctggaagtgtggtgcagctgagccacaaagcaaactttggtgcgagccacagtgcatcactttccttgcaaatgttcactgacagcagcacggtggaaagcatctcgctccagtgtgcgtgcagcctgaaagccatgatcatgtgccaaggctgcggtgcgttctgtcacgatgactgtattggaccctcaaagctctgtgtattgtgccttgtggtgagataa

SEQ ID NO: 402 - DNA, 1098 bp, Homo sapiens
atgtcaagctcagttgaacagaaaaaagggcctacaagacagcgcaaatgtggcttttgtaagtcaaatagagacaaggaatgtggacagttactaatatctgaaaaccagaaggtggcagcgcaccataagtgcatgctcttttcatctgctttggtatcatcacactctgataatgaaagtcttggtggattttctattgaagatgtccaaaaggaaattaaaagaggcacgaagctgatgtgttctttgtgccattgtcctggagcaacaattggttgtgatgtgaaaacatgtcacaggacataccactaccactgtgcattgcatgataaagctcaaatacgagagaaaccttcacaaggaatttacatggtctattgccgaaaacacaagaaaactgcacataactccgaagctgatttagaagaaagttttaatgaacatgaactggagccctcatcacctaaaagtaaaaagaaaagtcgcaaaggaaggccaagaaaaactaattttaaagggctgtcagaagataccaggtccacatcctcccatggaacagatgaaatggaaagtagttcctatagagataggtctccacacagaagcagccctagtgacaccaggcctaaatgtggattttgccatgtaggggaggaagaaaatgaagcacgaggaaaactgcatatatttaatgccaagaaggcagctgcccattataagtgcatgttgttttcttctggcacagtccagctcacaacaacatcaagagcagaatttggagactttgatattaaaactgtacttcaggagattaaacgaggaaaaagaatgaaatgtacactttgcagtcagcctggtgctactattggatgtgaaataaaagcctgtgttaagacttaccattaccactgtggagtacaagacaaagctaaatacattgaaaatatgtcacgaggaatttacaaactatactgtaaaaatcatagtggaaatgatgagagagatgaagaagatgaggaacgagagagtaaaagccgaggaaaagtagaaattgatcagcaacaactaactcagcagcaacttaatggaaactag

SEQ ID NO: 403 - DNA, 3915 bp, Homo sapiens
atggcgaagatcgccaagactcacgaagatattgaagcacagattcgagaaattcaaggcaagaaggcagctcttgatgaagctcaaggagtgggcctcgattctacaggttattatgaccaggaaatttatggtggaagtgacagcagatttgctggatacgtgacatcaattgctgcaactgaacttgaagatgatgacgatgactattcatcatctacgagtttgcttggtcagaagaagccaggatatcatgcccctgtggcattgcttaatgatataccacagtcaacagaacagtatgatccatttgctgagcacagacctccaaagattgcagaccgggaagatgaatacaaaaagcataggcggaccatgataatttccccagagcgtcttgatccttttgcagatggagggaaaacccctgatcctaaaatgaatgctaggacttacatggatgtaatgcgagaacaacacttgactaaagaagaacgagaaattaggcaacagctagcagaaaaagctaaagctggagaactaaaagtcgtcaatggagcagcagcgtcccagcctccatcaaaacgaaaacggcgttgggatcaaacagctgatcagactcctggtgccactcccaaaaaactatcaagttgggatcaggcagagacccctgggcatactccttccttaagatgggatgagacaccaggtcgtgcaaagggaagcgagactcctggagcaaccccaggctcaaaaatatgggatcctacacctagccacacaccagcgggagctgctactcctggacgaggtgatacaccaggccatgcgacaccaggccatggaggcgcaacttccagtgctcgtaaaaacagatgggatgaaacccccaaaacagagagagatactcctgggcatggaagtggatgggctgagactcctcgaacagatcgaggtggagattctattggtgaaacaccgactcctggagccagtaaaagaaaatcacggtgggatgaaacaccagctagtcagatgggtggaagcactccagttctgacccctggaaagacaccaattggcacaccagccatgaacatggctacccctactccaggtcacataatgagtatgactcctgaacagcttcaggcttggcggtgggaaagagaaattgatgagagaaatcgcccactttctgatgaggaattagatgctatgttcccagaaggatataaggtacttcctcctccagctggttatgttcctattcgaactccagctcgaaagctgacagctactccaacacctttgggtggtatgactggtttccacatgcaaactgaagatcgaactatgaaaagtgttaatgaccagccatctggaaatcttccatttttaaaacctgatgatattcaatactttgataaactattggttgatgttgatgaatcaacacttagtccagaagagcaaaaagagagaaaaataatgaagttgcttttaaaaattaagaatggaacaccaccaatgagaaaggctgcattgcgtcagattactgataaagctcgtgaatttggagctggtcctttgtttaatcagattcttcctctgctgatgtctcctacacttgaggatcaagagcgtcatttacttgtgaaagttattgataggatactgtacaaacttgatgacttagttcgtccatatgtgcataagatcctcgtggtcattgaaccgctattgattgatgaagattactatgctagagtggaaggccgagagatcatttctaatttggcaaaggctgctggtctggctactatgatctctaccatgagacctgatatagataacatggatgagtatgtccgtaacacaacagctagagcttttgctgttgtagcctctgccctgggcattccttctttattgcccttcttaaaagctgtgtgcaaaagcaagaagtcctggcaagcgagacacactggtattaagattgtacaacagatagctattcttatgggctgtgccatcttgccacatcttagaagtttagttgaaatcattgaacatggtcttgtggatgagcagcagaaagttcggaccatcagtgctttggccattgctgccttggctgaagcagcaactccttatggtatcgaatcttttgattctgtgttaaagcctttatggaagggtatccgccaacacagaggaaagggtttggctgctttcttgaaggctattgggtatcttattcctcttatggatgcagaatatgccaactactatactagagaagtgatgttaatccttattcgagaattccagtctcctgatgaggaaatgaaaaaaattgtgctgaaggtggtaaaacagtgttgtgggacagatggtgtagaagcaaactacattaaaacagagattcttcctcccttttttaaacacttctggcagcacaggatggctttggatagaagaaattaccgacagttagttgatactactgtggagttggcaaacaaagtaggtgcagcagaaattatatccaggattgtggatgatctgaaagatgaagccgaacagtacagaaaaatggtgatggagacaattgagaaaattatgggtaatttgggagcagcagatattgatcataaacttgaagaacaactgattgatggtattctttatgctttccaagaacagactacagaggactcagtaatgttgaacggctttggcacagtggttaatgctcttggcaaacgagtcaaaccatacttgcctcagatctgtggtacagttttgtggcgtttaaataacaaatctgctaaagttaggcaacaggcagctgacttgatttctcgaactgctgttgtcatgaagacttgtcaagaggaaaaattgatgggacacttgggtgttgtattgtatgagtatttgggtgaagagtaccctgaagtattgggcagcattcttggagcactgaaggccattgtaaatgtcataggtatgcataagatgactccaccaattaaagatctgctgcctagactcacccccatcttaaagaacagacatgaaaaagtacaagagaattgtattgatcttgttggtcgtattgctgacaggggagctgaatatgtatctgcaagagagtggatgaggatttgctttgagcttttagagctcttaaaagcccacaaaaaggctattcgtagagccacagtcaacacatttggttatattgcaaaggccattggccctcatgatgtattggctacacttctgaacaacctcaaagttcaagaaaggcagaacagagtttgtaccactgtagcaatagctattgttgcagaaacatgttcaccctttacagtactccctgccttaatgaatgaatacagagttcctgaactgaatgttcaaaatggagtgttaaaatcgctttccttcttgtttgaatatattggtgaaatgggaaaagactacatttatgccgtaacaccgttacttgaagatgctttaatggatagagaccttgtacacagacagacggctagtgcagtggtacagcacatgtcacttggggtttatggatttggttgtgaagattcgctgaatcacttgttgaactatgtatggcccaatgtatttgagacatctcctcatgtaattcaggcagttatgggagccctagagggcctgagagttgctattggaccatgtagaatgttgcaatattgtttacagggtctgtttcacccagcccggaaagtcagagatgtatattggaaaatttacaactccatctacattggttcccaggacgctctcatagcacattacccaagaatctacaacgatgataagaacacctatattcgttatgaacttgactatatcttataa

SEQ ID NO: 404 - DNA, 13 bp, Artificial Sequence
  Synthetic Polynucleotide
  misc_feature (1)..(13): n is a, c, g, or t
nnnnnnnnnnnnn

SEQ ID NO: 405 - DNA, 13 bp, Artificial Sequence
  Synthetic Polynucleotide
  misc_feature (1)..(13): n is a, c, g, or t
nnnnnnnnnnnnn

SEQ ID NO: 406 - DNA, 13 bp, Artificial Sequence
  Synthetic Polynucleotide
  misc_feature (1)..(13): n is a, c, g, or t
nnnnnnnnnnnnn

SEQ ID NO: 407 - DNA, 63 bp, Artificial Sequence
  Synthetic Polynucleotide
atggccttaccagtgaccgccttgctcctgccgctggccttgctgctccacgccgccaggccg

SEQ ID NO: 408 - DNA, 57 bp, Artificial Sequence
  Synthetic Polynucleotide
atggattggatatggaggatactttttctcgtgggggcagcaaccggggctcattcc

SEQ ID NO: 409 - DNA, 321 bp, Artificial Sequence
  Synthetic Polynucleotide
gacatccagatgacacagactacatcctccctgtctgcctctctgggagacagagtcaccatcagttgcagggcaagtcaggacattagtaaatatttaaattggtatcagcagaaaccagatggaactgttaaactcctgatctaccatacatcaagattacactcaggagtcccatcaaggttcagtggcagtgggtctggaacagattattctctcaccattagcaacctggagcaagaagatattgccacttacttttgccaacagggtaatacgcttccgtacacgttcggaggggggaccaagctggagatcaca

SEQ ID NO: 410 - DNA, 321 bp, Artificial Sequence
  Synthetic Polynucleotide
gagatcgtgctgacacagagccctgccaccctgtctctgagccctggcgaaagagccaccctgagctgtagagccagccagagcgtgtccagctacctggcctggtatcagcagaagcccggccaggctccccggctgctgatctacgatgccagcaatagagccaccggcatccccgccagattttccggctctggcagcggcaccgacttcaccctgaccatcagctccctggaacccgaggacttcgccgtgtactactgccagcagcggagcaactggcccatcacattcggccagggcacccggctggaaatcaaa

SEQ ID NO: 411 - DNA, 45 bp, Artificial Sequence
  Synthetic Polynucleotide
ggcggaggcggaagtggaggcggaggatctggcggcggaggctct

SEQ ID NO: 412 - DNA, 360 bp, Artificial Sequence
  Synthetic Polynucleotide
gaggtgaaactgcaggagtcaggacctggcctggtggcgccctcacagagcctgtccgtcacatgcactgtctcaggggtctcattacccgactatggtgtaagctggattcgccagcctccacgaaagggtctggagtggctgggagtaatatggggtagtgaaaccacatactataattcagctctcaaatccagactgaccatcatcaaggacaactccaagagccaagttttcttaaaaatgaacagtctgcaaactgatgacacagccatttactactgtgccaaacattattactacggtggtagctatgctatggactactggggtcaaggaacctcagtcaccgtctcctca

SEQ ID NO: 413 - DNA, 366 bp, Artificial Sequence
  Synthetic Polynucleotide
gaagtgcagctggtggaatcaggcggcggactggtgcagcctggcagaagcctgagactgagctgtgccgccagcggcttcaccttcaacgactacgccatgcactgggtgcgccaggcccctggaaaaggactggaatgggtgtccacaatcagctggaacagcggcagcatcggctacgccgatagcgtgaagggccggttcaccatcagccgggacaacgccaagaagtccctgtacctccagatgaacagcctgcgggccgaggacacagccctgtactattgcgccaaggacatccagtacggcaactactactacggcatggacgtgtggggccagggaaccaccgtgaccgtgtcatct

SEQ ID NO: 414 - DNA, 726 bp, Artificial Sequence
  Synthetic Polynucleotide
gacatccagatgacacagactacatcctccctgtctgcctctctgggagacagagtcaccatcagttgcagggcaagtcaggacattagtaaatatttaaattggtatcagcagaaaccagatggaactgttaaactcctgatctaccatacatcaagattacactcaggagtcccatcaaggttcagtggcagtgggtctggaacagattattctctcaccattagcaacctggagcaagaagatattgccacttacttttgccaacagggtaatacgcttccgtacacgttcggaggggggaccaagctggagatcacaggtggcggtggctcgggcggtggtgggtcgggtggcggcggatctgaggtgaaactgcaggagtcaggacctggcctggtggcgccctcacagagcctgtccgtcacatgcactgtctcaggggtctcattacccgactatggtgtaagctggattcgccagcctccacgaaagggtctggagtggctgggagtaatatggggtagtgaaaccacatactataattcagctctcaaatccagactgaccatcatcaaggacaactccaagagccaagttttcttaaaaatgaacagtctgcaaactgatgacacagccatttactactgtgccaaacattattactacggtggtagctatgctatggactactggggtcaaggaacctcagtcaccgtctcctca

SEQ ID NO: 415 - DNA, 732 bp, Artificial Sequence
  Synthetic Polynucleotide
gagatcgtgctgacacagagccctgccaccctgtctctgagccctggcgaaagagccaccctgagctgtagagccagccagagcgtgtccagctacctggcctggtatcagcagaagcccggccaggctccccggctgctgatctacgatgccagcaatagagccaccggcatccccgccagattttccggctctggcagcggcaccgacttcaccctgaccatcagctccctggaacccgaggacttcgccgtgtactactgccagcagcggagcaactggcccatcacattcggccagggcacccggctggaaatcaaaggcggaggcggaagtggaggcggaggatctggcggcggaggctctgaagtgcagctggtggaatcaggcggcggactggtgcagcctggcagaagcctgagactgagctgtgccgccagcggcttcaccttcaacgactacgccatgcactgggtgcgccaggcccctggaaaaggactggaatgggtgtccacaatcagctggaacagcggcagcatcggctacgccgatagcgtgaagggccggttcaccatcagccgggacaacgccaagaagtccctgtacctccagatgaacagcctgcgggccgaggacacagccctgtactattgcgccaaggacatccagtacggcaactactactacggcatggacgtgtggggccagggaaccaccgtgaccgtgtcatct

SEQ ID NO: 416 - DNA, 30 bp, Artificial Sequence
  Synthetic Polynucleotide
gagcagaaactgatctcggaagaggatctg

SEQ ID NO: 417 - DNA, 42 bp, Artificial Sequence
  Synthetic Polynucleotide
gggaaaccaattcccaaccctcttctgggactggattcaacc

SEQ ID NO: 418 - DNA, 66 bp, Artificial Sequence
  Synthetic Polynucleotide
gtgaagcagaccctgaatttcgacctgctgaagctggctggcgacgtggaatccaacccaggccct

SEQ ID NO: 419 - DNA, 54 bp, Artificial Sequence
  Synthetic Polynucleotide
gagggcagaggaagtctactaacctgcggagatgtggaagaaaatcctggccca

SEQ ID NO: 420 - DNA, 54 bp, Artificial Sequence
  Synthetic Polynucleotide
gagggaagaggtagcctcctcacctgtggggacgttgaagagaaccccggccca

SEQ ID NO: 421 - DNA, 57 bp, Artificial Sequence
  Synthetic Polynucleotide
gcaacaaacttctcactactcaaacaagcaggtgacgtggaggagaatcccgggcct

SEQ ID NO: 422 - DNA, 57 bp, Artificial Sequence
  Synthetic Polynucleotide
gcaacaaacttctcactactcaaacaagcaggtgacgtggagcagaatcccgggcct

SEQ ID NO: 423 - DNA, 60 bp, Artificial Sequence
  Synthetic Polynucleotide
caatgcactaattacgcattgctcaagctggccggtgacgttgagagtaatcctggcccc

SEQ ID NO: 424 - DNA, 12 bp, Artificial Sequence
  Synthetic Polynucleotide
tctggatctgga

SEQ ID NO: 425 - DNA, 12 bp, Artificial Sequence
  Synthetic Polynucleotide
agcggatctggc

SEQ ID NO: 426 - DNA, 12 bp, Artificial Sequence
  Synthetic Polynucleotide
cgggccaagaga

SEQ ID NO: 427 - DNA, 216 bp, Artificial Sequence
  Synthetic Polynucleotide
gcgaagcccaccacgacgccagcgccgcgaccaccaacaccggcgcccaccatcgcgtcgcagcccctgtccctgcgcccagaggcgtgccggccagcggcggggggcgcagtgcacacgagggggctggacttcgcctgtgacatctacatctgggcgcccttggccgggacttgtggggtccttctcctgtcactggttatcaccctttactgc

SEQ ID NO: 428 - DNA, 678 bp, Artificial Sequence
  Synthetic Polynucleotide
gcgaagcccaccacgacgccagcgccgcgaccaccaacaccggcgcccaccatcgcgtcgcagcccctgtccctgcgcccagaggcgtgccggccagcggcggggggcgcagtgcacacgagggggctggacttcgcctgtgacatctacatctgggcgcccttggccgggacttgtggggtccttctcctgtcactggttatcaccctttactgcaaacggggcagaaagaaactcctgtatatattcaaacaaccatttatgagaccagtacaaactactcaagaggaagatggctgtagctgccgatttccagaagaagaagaaggaggatgtgaactgagagtgaagttcagcaggagcgcagacgcccccgcgtaccagcagggccagaaccagctctataacgagctgaatctaggacgaagagaggagtacgatgttttggacaagagacgtggccgggaccctgagatggggggaaagccgagaaggaagaaccctcaggaaggcctgtacaatgaactgcagaaagataagatggcggaggcctacagtgagattgggatgaaaggcgagcgccggaggggcaaggggcacgatggcctttaccagggtctcagtacagccaccaaggacacctacgacgcccttcacatgcaggccctgccccctcgc

SEQ ID NO: 429 - DNA, 342 bp, Artificial Sequence
  Synthetic Polynucleotide
gcgaagcccaccacgacgccagcgccgcgaccaccaacaccggcgcccaccatcgcgtcgcagcccctgtccctgcgcccagaggcgtgccggccagcggcggggggcgcagtgcacacgagggggctggacttcgcctgtgacatctacatctgggcgcccttggccgggacttgtggggtccttctcctgtcactggttatcaccctttactgcaaacggggcagaaagaaactcctgtatatattcaaacaaccatttatgagaccagtacaaactactcaagaggaagatggctgtagctgccgatttccagaagaagaagaaggaggatgtgaactg

SEQ ID NO: 430 - DNA, 126 bp, Artificial Sequence
  Synthetic Polynucleotide
aaacggggcagaaagaaactcctgtatatattcaaacaaccatttatgagaccagtacaaactactcaagaggaagatggctgtagctgccgatttccagaagaagaagaaggaggatgtgaactg

SEQ ID NO: 431 - DNA, 336 bp, Artificial Sequence
  Synthetic Polynucleotide
agagtgaagttcagcaggagcgcagacgcccccgcgtaccagcagggccagaaccagctctataacgagctgaatctaggacgaagagaggagtacgatgttttggacaagagacgtggccgggaccctgagatggggggaaagccgagaaggaagaaccctcaggaaggcctgtacaatgaactgcagaaagataagatggcggaggcctacagtgagattgggatgaaaggcgagcgccggaggggcaaggggcacgatggcctttaccagggtctcagtacagccaccaaggacacctacgacgcccttcacatgcaggccctgccccctcgc

SEQ ID NO: 432 - DNA, 336 bp, Artificial Sequence
  Synthetic Polynucleotide
agagtgaagttcagcaggagcgcagacgcccccgcgtaccagcagggccagaaccagctctataacgagctcaatctaggacgaagagaggagtacgatgttttggacaagagacgtggccgggaccctgagatggggggaaagccgagaaggaagaaccctcaggaaggcctgtacaatgaactgcagaaagataagatggcggaggcctacagtgagattgggatgaaaggcgagcgccggaggggcaaggggcacgatggcctttaccagggtctcagtacagccaccaaggacacctacgacgcccttcacatgcaggccctgccccctcgc

SEQ ID NO: 433 - DNA, 324 bp, Artificial Sequence
  Synthetic Polynucleotide
aaaattgaagttatgtatcctcctccttacctagacaatgagaagagcaatggaaccattatccatgtgaaagggaaacacctttgtccaagtcccctatttcccggaccttctaagcccttttgggtgctggtggtggttgggggagtcctggcttgctatagcttgctagtaacagtggcctttattattttctgggtgaggagtaagaggagcaggctcctgcacagtgactacatgaacatgactccacgccgccccggacccacccgcaagcattaccagccctatgccccaccacgcgacttcgcagcctatcgctcc

SEQ ID NO: 434 - DNA, 501 bp, Artificial Sequence
  Synthetic Polynucleotide
aaagagagcagcggcggacccgacagccctgatacagagcctggaagctctgccggacctacccagaggcccagcgacaacagccacaatgaacacgcccctgccagccagggactgaaggccgagcacctgtacatcctgatcggcgtgtccgtggtgttcctgttctgcctgctgctgctggtgctgttctgtctgcaccggcagaaccagatcaagcagggacctcccagaagcaaggacgaggaacagaagcctcagcagaggcccgacctggccgtggacgtgctggaaagaacagccgacaaggccaccgtgaacggcctgcccgagaaggacagagagacagacacaagcgccctggccgctggcagctctcaggaagtgacatacgcccagctggaccactgggctctgacccagagaacagccagagccgtgtccccccagagcaccaaacctatggccgagagcatcacctacgccgccgtggctagacac

SEQ ID NO: 435 - DNA, 450 bp, Artificial Sequence
  Synthetic Polynucleotide
ttcaagatccccatcgaggaactggaagatcgggtgttcgtgaactgcaacacctctatcacctgggtggaaggcaccgtgggaacactgctgagcgacatcaccagactggacctcggcaagcggattctggaccctcggggcatctacagatgcaacggcaccgacatctacaaggacaaagaaagcaccgtgcaggtccactacagaatgtgccagtcctgcgtggaactggaccctgctacagtggccggcatcatcgtgaccgatgtgatcgctactctgctgctggctctgggagtgttctgcttcgccggacacgaaacaggcagactgtctggcgctgccgatacacaggccctgctgagaaacgaccaagtgtatcagcccctgcgcgacagagatgatgcccagtattctcacctcggcggcaactgggctagaaacaag

SEQ ID NO: 436 - DNA, 450 bp, Artificial Sequence
  Synthetic Polynucleotide
ttcaagattccaatcgaggaacttgaagatcgggtgtttgtgaactgcaatacgagcattacgtgggtagaagggacggtcggcacattgctttccgacatcactcgcttggacttgggtaaaaggatactcgatccacgaggaatttaccgatgcaacggaaccgacatatacaaggacaaagaatctacggttcaggttcactatcggatgtgtcagagctgcgttgaactcgatccggccaccgtcgccgggattatcgtgaccgacgtaattgctacactgctgcttgcacttggggtattctgtttcgcgggacacgagacggggagactctccggcgctgcggacacacaggcccttttgagaaacgatcaggtctaccaacctttgcgggatcgagacgatgcccaatactcccaccttggcgggaactgggccaggaataag

SEQ ID NO: 437 - DNA, 390 bp, Artificial Sequence
  Synthetic Polynucleotide
gacggtaacgaggagatgggaggaatcactcaaaccccttacaaagtctcaatttcaggaacaactgttatccttacatgtccccagtatcctggcagcgagatcctttggcagcataacgacaagaatatagggggagatgaagacgataagaatatcggatctgacgaggatcacttgagcctgaaagagttctccgagcttgaacaaagcggatattatgtgtgctatccgcgcgggtcaaagccggaagacgctaacttttacctttatctccgagccagagtgtgcgaaaattgcatggaaatggacgttatgtccgttgctacaatagttatcgtagatatatgcatcacgggtggactgcttctgctggtttattattggtcc

SEQ ID NO: 438 - DNA, 165 bp, Artificial Sequence
  Synthetic Polynucleotide
aagaatagaaaggccaaagctaaacccgtgaccagaggcgctggcgcaggcggaaggcaaaggggacaaaacaaagaacggccaccaccagtgccaaatccagattatgagcctattcggaaaggacagagggacctgtactctggcctgaatcagagaagaatc

SEQ ID NO: 439 - DNA, 555 bp, Artificial Sequence
  Synthetic Polynucleotide
gacggtaacgaggagatgggaggaatcactcaaaccccttacaaagtctcaatttcaggaacaactgttatccttacatgtccccagtatcctggcagcgagatcctttggcagcataacgacaagaatatagggggagatgaagacgataagaatatcggatctgacgaggatcacttgagcctgaaagagttctccgagcttgaacaaagcggatattatgtgtgctatccgcgcgggtcaaagccggaagacgctaacttttacctttatctccgagccagagtgtgcgaaaattgcatggaaatggacgttatgtccgttgctacaatagttatcgtagatatatgcatcacgggtggactgcttctgctggtttattattggtccaagaatagaaaggccaaagctaaacccgtgaccagaggcgctggcgcaggcggaaggcaaaggggacaaaacaaagaacggccaccaccagtgccaaatccagattatgagcctattcggaaaggacagagggacctgtactctggcctgaatcagagaagaatc

SEQ ID NO: 440 - DNA, 480 bp, Artificial Sequence
  Synthetic Polynucleotide
cagagcatcaagggcaaccacctggtcaaggtgtacgactaccaagaggacggcagcgtgctgctgacatgtgatgccgaggccaagaacatcacctggtttaaggacggcaagatgatcggcttcctgaccgaggacaagaagaagtggaacctgggcagcaacgctaaggaccccagaggcatgtatcagtgcaagggcagccagaacaagagcaagcccctccaggtgtactaccggatgtgccagaactgcatcgagctgaacgccgctaccatcagcggctttctgttcgccgagatcgtgtccatcttcgtgctggccgtgggcgtgtactttatcgctggacaggatggcgtgcggcagagcagagcttccgataagcaaaccctgctgcctaacgaccagctgtaccagcctctgaaggacagagaggacgaccagtacagccacctccagggcaatcagctgagaagaaac

SEQ ID NO: 441 - DNA, 480 bp, Artificial Sequence
  Synthetic Polynucleotide
cagtcaataaaagggaatcatttggtcaaagtttatgattatcaggaggatgggagtgtcctcttgacgtgtgacgcagaggcaaagaatatcacttggttcaaggacggaaaaatgataggctttcttaccgaagacaagaagaaatggaaccttgggtcaaatgctaaagatccccgagggatgtaccaatgtaaaggatcacaaaacaaaagtaaacccctccaggtatattatagaatgtgccagaactgcatcgagttgaatgcggccacaattagcggctttttgttcgctgaaatcgtctccatcttcgtcctcgcagtcggcgtctactttatcgcaggacaggacggggtccgacaaagccgcgcctccgacaagcaaacacttcttcccaacgaccagttgtatcaaccgctgaaagaccgggaagatgaccagtattcacatctccaaggcaatcagctccgcagaaac

SEQ ID NO: 442 - DNA, 390 bp, Artificial Sequence
  Synthetic Polynucleotide
gacggcaatgaggaaatgggcggcatcacccagacaccatacaaggtgtccatcagcggcaccaccgtgatcctgacctgtcctcagtatcccggcagcgagattctgtggcagcacaacgacaagaacatcggcggcgacgaggacgataagaatatcggctccgatgaggaccacctgagcctgaaagagttcagcgagctggaacagagcggctactacgtgtgctaccccagaggcagcaagcccgaggacgccaacttttacctgtacctgagagccagagtgtgcgagaactgcatggaaatggacgtgatgtccgtggctaccatcgtgatcgtggacatctgcatcaccggcggactgctgctgctggtgtactactggtcc

SEQ ID NO: 443 - DNA, 165 bp, Artificial Sequence
  Synthetic Polynucleotide
aagaaccggaaggccaaggccaagcctgtgacaagaggtgctggtgctggcggcagacagagaggccagaacaaagaaagacctcctcctgtgcctaatcctgactacgagcccatcagaaaaggccagcgggatctgtacagcggcctgaaccagagaagaatc

SEQ ID NO: 444 - DNA, 555 bp, Artificial Sequence
  Synthetic Polynucleotide
gacggcaatgaggaaatgggcggcatcacccagacaccatacaaggtgtccatcagcggcaccaccgtgatcctgacctgtcctcagtatcccggcagcgagattctgtggcagcacaacgacaagaacatcggcggcgacgaggacgataagaatatcggctccgatgaggaccacctgagcctgaaagagttcagcgagctggaacagagcggctactacgtgtgctaccccagaggcagcaagcccgaggacgccaacttttacctgtacctgagagccagagtgtgcgagaactgcatggaaatggacgtgatgtccgtggctaccatcgtgatcgtggacatctgcatcaccggcggactgctgctgctggtgtactactggtccaagaaccggaaggccaaggccaagcctgtgacaagaggtgctggtgctggcggcagacagagaggccagaacaaagaaagacctcctcctgtgcctaatcctgactacgagcccatcagaaaaggccagcgggatctgtacagcggcctgaaccagagaagaatc

SEQ ID NO: 445 - DNA, 90 bp, Artificial Sequence
  Synthetic Polynucleotide
cagagcttcggcctgctggaccccaagctgtgctacctgctggatggcatcctgttcatctacggcgtgatcctgaccgccctgttcctg

SEQ ID NO: 446 - DNA, 339 bp, Artificial Sequence
  Synthetic Polynucleotide
agagtgaagttcagcagaagcgccgacgcccctgcctaccagcagggacagaaccaactgtacaacgagctgaacctgggcagacgggaagagtacgacgtgctggacaagcggagaggcagggaccctgagatgggcggaaagccccagcggagaaagaacccccaggaaggactgtataacgaactccagaaagacaagatggccgaagcctacagcgagatcggcatgaagggcgagcggagaagaggcaagggccacgatggcctgtaccagggcctgagcaccgccaccaaggacacctatgacgccctgcacatgcaggccctgcctccaaga

SEQ ID NO: 447 - DNA, 90 bp, Artificial Sequence
  Synthetic Polynucleotide
cagagttttgggttgttggaccctaaattgtgctatctgttggacggaatcctgttcatttacggagtgatcctgaccgcattgttcctg

SEQ ID NO: 448 - DNA, 339 bp, Artificial Sequence
  Synthetic Polynucleotide
cgggttaagttttccagatccgcagacgcacccgcttaccaacaagggcagaaccaactctacaatgaacttaatttggggcggagggaagagtacgacgttctggacaaaaggaggggacgagatcccgagatgggcggaaagcctcagcgaaggaagaatccgcaagaggggctttataacgaactccagaaagataaaatggcagaagcctatagtgagattgggatgaagggagaaaggaggaggggtaaaggtcacgatgggttgtaccaaggattgagcacagccactaaagatacctatgatgcgctccacatgcaggccctgccgccaaga

SEQ ID NO: 449 - DNA, 429 bp, Artificial Sequence
  Synthetic Polynucleotide
cagagttttgggttgttggaccctaaattgtgctatctgttggacggaatcctgttcatttacggagtgatcctgaccgcattgttcctgcgggttaagttttccagatccgcagacgcacccgcttaccaacaagggcagaaccaactctacaatgaacttaatttggggcggagggaagagtacgacgttctggacaaaaggaggggacgagatcccgagatgggcggaaagcctcagcgaaggaagaatccgcaagaggggctttataacgaactccagaaagataaaatggcagaagcctatagtgagattgggatgaagggagaaaggaggaggggtaaaggtcacgatgggttgtaccaaggattgagcacagccactaaagatacctatgatgcgctccacatgcaggccctgccgccaaga

SEQ ID NO: 450 - DNA, 519 bp, Artificial Sequence
  Synthetic Polynucleotide
ggacagcctaaggccaatcctaccgtgacactgttccctccaagcagcgaagaactccaggccaacaaggccacacttgtgtgcctgatctccgacttctaccctggggctgtgacagtggcttggaaggccgatggatctcctgtgaaagccggcgtggaaaccaccaagccatccaagcagagcaacaacaaatacgccgccagctcctacctgagcctgacacctgagcagtggaagtcccacagatcctacagctgccaagtgacccacgaaggcagcaccgtggaaaagacagtggcccctacagagtgcagccccatcaagaccgatgtgattacaatggaccccaaggacaactgctccaaggacgccaacgataccctgctgctccagctgaccaacaccagcgcctactacatgtacttgttgctgctgctgaagtccgtggtgtacttcgccatcatcacatgctgcctgctgcggagaaccgccttctgctgcaacggcgagaagtct

SEQ ID NO: 451 - DNA, 477 bp, Artificial Sequence
  Synthetic Polynucleotide
ggacagcctaaggccaatcctaccgtgacactgttccctccaagcagcgaagaactccaggccaacaaggccacacttgtgtgcctgatctccgacttctaccctggggctgtgacagtggcttggaaggccgatggatctcctgtgaaagccggcgtggaaaccaccaagccatccaagcagagcaacaacaaatacgccgccagctcctacctgagcctgacacctgagcagtggaagtcccacagatcctacagctgccaagtgacccacgaaggcagcaccgtggaaaagacagtggcccctacagagtgcagcggcagagccgattgcggcatcaccagcgccagctaccaccagggcgtgctgagcgccaccatcctgtacgagatcctgctgggcaaggccaccctgtacgccgtgctggtgtctgccctggtgctgatggctatggtcaagcggaaggacagccgggga

SEQ ID NO: 452 - DNA, 477 bp, Artificial Sequence
  Synthetic Polynucleotide
ggacagcctaaggccaatcctaccgtgacactgttccctccaagcagcgaagaactccaggccaacaaggccacacttgtgtgcctgatctccgacttctaccctggggctgtgacagtggcttggaaggccgatggatctcctgtgaaagccggcgtggaaaccaccaagccatccaagcagagcaacaacaaatacgccgccagctcctacctgagcctgacacctgagcagtggaagtcccacagatcctacagctgccaagtgacccacgaaggcagcaccgtggaaaagacagtggcccctacagagtgcagcggcagagccgattgcggctttaccagcgagagctaccagcagggcgtgctgagcgccaccatcctgtacgagatcctgctgggcaaggccaccctgtacgccgtgctggtgtctgccctggtgctgatggctatggtcaagcggaaggacagccgggga

SEQ ID NO: 453 - DNA, 513 bp, Artificial Sequence
  Synthetic Polynucleotide
gcctctacaaagggaccctccgtgtttcctctggctcccagcagcaagtctacaagcggaggaacagccgctctgggctgcctggtcaaggattactttcccgagcctgtgaccgtgtcctggaatagcggagcactgacaagcggcgtgcacacctttccagccgtgctgcaaagcagcggcctgtactctctgagcagcgtggtcacagtgcctagctctagcctgggcacccagacctacatctgcaatgtgaaccacaagcctagcaacaccaaggtggacaagagagtggaacccaagagctgtgaagtgaaaaccgactccaccgaccacgtgaagcccaaagagacagagaacaccaagcagcccagcaagagctgccacaagcccaaggccatcgtgcacaccgagaaagtgaacatgatgagcctgaccgtgctgggcctgcggatgctgttcgccaaaaccgtggccgtgaacttcctgctgaccgccaagctgttcttcctc

SEQ ID NO: 454 - DNA, 489 bp, Artificial Sequence
  Synthetic Polynucleotide
gcctctacaaagggaccctccgtgtttcctctggctcccagcagcaagtctacaagcggaggaacagccgctctgggctgcctggtcaaggattactttcccgagcctgtgaccgtgtcctggaatagcggagcactgacaagcggcgtgcacacctttccagccgtgctgcaaagcagcggcctgtactctctgagcagcgtggtcacagtgcctagctctagcctgggcacccagacctacatctgcaatgtgaaccacaagcctagcaacaccaaggtggacaagagagtggaacccaagagctgtatccccgaggacacattcttcccaagcagcgacgtgccctgcgacgtgaagctggtggaaaagagcttcgagacagacaccaacctgaacttccagaacctgagcgtgatcggcttcagaatcctgctgctgaaagtggccggctttaacctgctgatgaccctgcggctgtggtccagc

SEQ ID NO: 455 - DNA, 489 bp, Artificial Sequence
  Synthetic Polynucleotide
gcctctacaaagggaccctccgtgtttcctctggctcccagcagcaagtctacaagcggaggaacagccgctctgggctgcctggtcaaggattactttcccgagcctgtgaccgtgtcctggaatagcggagcactgacaagcggcgtgcacacctttccagccgtgctgcaaagcagcggcctgtactctctgagcagcgtggtcacagtgcctagctctagcctgggcacccagacctacatctgcaatgtgaaccacaagcctagcaacaccaaggtggacaagagagtggaacccaagagctgtatccccgaggacacattcttcccaagccccgagagcagctgcgacgtgaagctggtggaaaagagcttcgagacagacaccaacctgaacttccagaacctgagcgtgatcggcttcagaatcctgctgctgaaagtggccggctttaacctgctgatgaccctgcggctgtggtccagc

SEQ ID NO: 456 - DNA, 423 bp, Artificial Sequence
  Synthetic Polynucleotide
gatatccagaaccctgaccctgccgtgtaccagctgagagactctaaatccagtgacaagtctgtctgcctattcaccgattttgattctcaaacaaatgtgtcacaaagtaaggattctgatgtgtatatcacagacaaaactgtgctagacatgaggtctatggacttcaagagcaacagtgctgtggcctggagcaacaaatctgactttgcatgtgcaaacgccttcaacaacagcattattccagaagacaccttcttccccagcccagaaagttcctgtgatgtcaagctggtcgagaaaagctttgaaacagatacgaacctaaactttcaaaacctgtcagtgattgggttccgaatcctcctcctgaaagtggccgggtttaatctgctcatgacgctgcggctgtggtccagc

SEQ ID NO: 457 - DNA, 420 bp, Artificial Sequence
  Synthetic Polynucleotide
atccagaaccctgaccctgccgtgtaccagctgagagactctaaatccagtgacaagtctgtctgcctattcaccgattttgattctcaaacaaatgtgtcacaaagtaaggattctgatgtgtatatcacagacaaaactgtgctagacatgaggtctatggacttcaagagcaacagtgctgtggcctggagcaacaaatctgactttgcatgtgcaaacgccttcaacaacagcattattccagaagacaccttcttccccagcccagaaagttcctgtgatgtcaagctggtcgagaaaagctttgaaacagatacgaacctaaactttcaaaacctgtcagtgattgggttccgaatcctcctcctgaaagtggccgggtttaatctgctcatgacgctgcggctgtggtccagc

SEQ ID NO: 458 - DNA, 420 bp, Artificial Sequence
  Synthetic Polynucleotide
atccagaaccctgatcctgccgtgtaccagctgcgggatagcaagagcagcgacaagagcgtgtgtctgttcaccgacttcgacagccagaccaacgtgtcccagagcaaggactccgacgtgtacatcaccgataagtgcgtgctggacatgcggagcatggacttcaagagcaactccgccgtggcctggtccaacaagtccgatttcgcctgcgccaacgccttcaacaacagcattatccccgaggacacattcttcccaagcagcgacgtgccctgcgacgtgaagctggtggaaaagagcttcgagacagacaccaacctgaacttccagaacctgagcgtgatcggcttcagaatcctgctgctgaaagtggccggctttaacctgctgatgaccctgcggctgtggtccagc

SEQ ID NO: 459 - DNA, 420 bp, Artificial Sequence
  Synthetic Polynucleotide
atccagaaccctgatcctgccgtgtaccagctgcgggatagcaagagcagcgacaagagcgtgtgtctgttcaccgacttcgacagccagaccaacgtgtcccagagcaaggactccgacgtgtacatcaccgataagtgcgtgctggacatgcggagcatggacttcaagagcaactccgccgtggcctggtccaacaagtccgatttcgcctgcgccaacgccttcaacaacagcattatccccgaggacacattcttcccaagccccgagagcagctgcgacgtgaagctggtggaaaagagcttcgagacagacaccaacctgaacttccagaacctgagcgtgatcggcttcagaatcctgctgctgaaagtggccggctttaacctgctgatgaccctgcggctgtggtccagc

SEQ ID NO: 460 - DNA, 717 bp, Artificial Sequence
  Synthetic Polynucleotide
atccagaaccctgatcctgccgtgtaccagctgcgggatagcaagagcagcgacaagagcgtgtgtctgttcaccgacttcgacagccagaccaacgtgtcccagagcaaggactccgacgtgtacatcaccgataagaccgtgctggacatgcggagcatggacttcaagagcaactccgccgtggcctggtccaacaagtccgatttcgcctgcgccaacgccttcaacaacagcattatccccgaggacacattcttcccaagccccgagagcagctgcggtacccagagttttgggttgttggaccctaaattgtgctatctgttggacggaatcctgttcatttacggagtgatcctgaccgcattgttcctgcgggttaagttttccagatccgcagacgcacccgcttaccaacaagggcagaaccaactctacaatgaacttaatttggggcggagggaagagtacgacgttctggacaaaaggaggggacgagatcccgagatgggcggaaagcctcagcgaaggaagaatccgcaagaggggctttataacgaactccagaaagataaaatggcagaagcctatagtgagattgggatgaagggagaaaggaggaggggtaaaggtcacgatgggttgtaccaaggattgagcacagccactaaagatacctatgatgcgctccacatgcaggccctgccgccaaga

SEQ ID NO: 461 - DNA, 531 bp, Artificial Sequence
  Synthetic Polynucleotide
gaggacctgaacaaggtgttcccacccgaggtcgctgtgtttgagccatcagaagcagagatctcccacacccaaaaggccacactggtgtgcctggccacaggcttcttccccgaccacgtggagctgagctggtgggtgaatgggaaggaggtgcacagtggggtcagcacagacccgcagcccctcaaggagcagcccgccctcaatgactccagatactgcctgagcagccgcctgagggtctcggccaccttctggcagaacccccgcaaccacttccgctgtcaagtccagttctacgggctctcggagaatgacgagtggacccaggatagggccaaacccgtcacccagatcgtcagcgccgaggcctggggtagagcagactgtggctttacctcggtgtcctaccagcaaggggtcctgtctgccaccatcctctatgagatcctgctagggaaggccaccctgtatgctgtgctggtcagcgcccttgtgttgatggccatggtcaagagaaaggatttc

SEQ ID NO: 462 - DNA, 537 bp, Artificial Sequence
  Synthetic Polynucleotide
gaggacctgaaaaacgtgttcccacccgaggtcgctgtgtttgagccatcagaagcagagatctcccacacccaaaaggccacactggtatgcctggccacaggcttctaccccgaccacgtggagctgagctggtgggtgaatgggaaggaggtgcacagtggggtcagcacagacccgcagcccctcaaggagcagcccgccctcaatgactccagatactgcctgagcagccgcctgagggtctcggccaccttctggcagaacccccgcaaccacttccgctgtcaagtccagttctacgggctctcggagaatgacgagtggacccaggatagggccaaacccgtcacccagatcgtcagcgccgaggcctggggtagagcagactgtggcttcacctccgagtcttaccagcaaggggtcctgtctgccaccatcctctatgagatcttgctagggaaggccaccttgtatgccgtgctggtcagtgccctcgtgctgatggccatggtcaagagaaaggattccagaggc

SEQ ID NO: 463 - DNA, 537 bp, Artificial Sequence; identical to SEQ ID NO: 462
  Synthetic Polynucleotide

SEQ ID NO: 464 - DNA, 537 bp, Artificial Sequence
  Synthetic Polynucleotide
gaggacctgaagaacgtgttcccacctgaggtggccgtgttcgagcctagcgaggccgagatcagccacacccagaaagccaccctcgtgtgcctggctaccggcttctaccccgaccatgtggaactgtcttggtgggtcaacggcaaagaggtgcacagcggcgtgtgtaccgacccccagccactgaaagaacagcccgccctgaacgacagccggtactgcctgagcagcagactgagagtgtccgccaccttctggcagaacccccggaaccacttcagatgccaggtgcagttctacggcctgagcgagaacgacgagtggacccaggacagagccaagcccgtgacccagatcgtgtctgccgaagcctggggcagagccgattgcggctttaccagcgagagctaccagcagggcgtgctgagcgccaccatcctgtacgagatcctgctgggcaaggccaccctgtacgccgtgctggtgtctgccctggtgctgatggctatggtcaagcggaaggacagccgggga

SEQ ID NO: 465 - DNA, 537 bp, Artificial Sequence
  Synthetic Polynucleotide
gaggacctgaagaacgtgttcccacctgaggtggccgtgttcgagcctagcaaggccgagatcgcccacacccagaaagccaccctcgtgtgcctggctaccggcttctaccccgaccatgtggaactgtcttggtgggtcaacggcaaagaggtgcacagcggcgtgtgtaccgacccccagccactgaaagaacagcccgccctgaacgacagccggtactgcctgagcagcagactgagagtgtccgccaccttctggcagaacccccggaaccacttcagatgccaggtgcagttctacggcctgagcgagaacgacgagtggacccaggacagagccaagcccgtgacccagatcgtgtctgccgaagcctggggcagagccgattgcggcatcaccagcgccagctaccaccagggcgtgctgagcgccaccatcctgtacgagatcctgctgggcaaggccaccctgtacgccgtgctggtgtctgccctggtgctgatggctatggtcaagcggaaggacagccgggga

SEQ ID NO: 466 - DNA, 828 bp, Artificial Sequence
  Synthetic Polynucleotide
gaggacctgaagaacgtgttcccacctgaggtggccgtgttcgagcctagcgaggccgagatcagccacacccagaaagccaccctcgtgtgcctggctaccggcttctaccccgaccatgtggaactgtcttggtgggtcaacggcaaagaggtgcacagcggcgtgtctaccgacccccagccactgaaagaacagcccgccctgaacgacagccggtactgcctgagcagcagactgagagtgtccgccaccttctggcagaacccccggaaccacttcagatgccaggtgcagttctacggcctgagcgagaacgacgagtggacccaggacagagccaagcccgtgacccagatcgtgtctgccgaagcctggggcagagccgattgcggatcccagagcttcggcctgctggaccccaagctgtgctacctgctggatggcatcctgttcatctacggcgtgatcctgaccgccctgttcctgagagtgaagttcagcagaagcgccgacgcccctgcctaccagcagggacagaaccaactgtacaacgagctgaacctgggcagacgggaagagtacgacgtgctggacaagcggagaggcagggaccctgagatgggcggaaagccccagcggagaaagaacccccaggaaggactgtataacgaactccagaaagacaagatggccgaagcctacagcgagatcggcatgaagggcgagcggagaagaggcaagggccacgatggcctgtaccagggcctgagcaccgccaccaaggacacctatgacgccctgcacatgcaggccctgcctccaaga

SEQ ID NO: 467 - DNA, 807 bp, Artificial Sequence
  Synthetic Polynucleotide
  misc_feature (540)..(540): n is a, c, g, or t
gggtgtccagccctacccacaggtgtgggcggcacaccctttccttctctggccccaccaatcatgctgctggtggatggaaagcagcagatggtggtggtctgcctggtccttgatgttgcaccccctggccttgacagccccatctggttctcagccggcaatggcagtgcactggatgccttcacctatggcccttccccagcaacggatggcacctggaccaacttggcccatctctccctgccttctgaggagctggcatcctgggagcctttggtctgccacactgggcctggggctgagggtcacagcaggagtacacagcccatgcatctgtcaggagaggcttctacagccaggacctgcccccaggagcctctcagggggacaccgggtggggcgctgtggctgggggtcctgcggctgctgctcttcaagctgctgctgtttgacctgctcctgacctgcagctgcctgtgcgaccccgcgggcccgctgccttcccccgcaaccaccacccgcctgcgagccctcggntcccatcgactgcacccggccacggagactgggggacgagaggccaccagctcacccagaccccagcctcgggaccgccgctggggtgacacccctccgggtcggaagcccgggagcccagtatggggggaagggtcttacctcagcagttaccccacttgcccagcacaggcctggtgctcaagatctcgcctcagggctccttcctccagtcttggagcattttttgcaggtgacctgcctcctcctctgcaggctggagctgcc

SEQ ID NO: 468 - DNA, 774 bp, Artificial Sequence
  Synthetic Polynucleotide
accccattcccttctctggcccctcccatcatgctgctggtggacggcaagcagcagatggtggtcgtgtgcctggtgctggatgtggccccacctggactggacagccccatctggtttagcgccggcaatggctctgccctggacgcctttacctacggcccaagccctgccaccgatggcacctggacaaatctggcccacctgagcctgcccagcgaggaactggcttcttgggagcctctcgtgtgccacacaggacctggcgctgagggacacagcagatccacccagcctatgcacctgtctggcgaggccagcaccgccagaacctgtcctcaggaacctctgagaggcacccctggcggagcactgtggctgggagtgctgagactgctgctgttcaagctgctgctgtttgacctgctgctgacctgctcctgtctgtgcgatcctgccggccctctgccttctcctgccaccaccacaagactgagagccctgggcagccacagactgcaccctgccacagagacaggcggcagagaggccacaagcagccctagaccccagcccagagacagaagatggggcgataccccccctggcagaaagcctggatctccagtgtggggcgagggcagctacctgagcagctaccctacatgccctgcccaggcttggtgcagcagaagcgcactgagagcacccagctctagcctgggagccttctttgccggcgatctgcctccaccactccaggctggcgctgct

SEQ ID NO: 469 - DNA, 630 bp, Artificial Sequence
  Synthetic Polynucleotide
accccattcccttctctggcccctcccatcatgctgctggtggacggcaagcagcagatggtggtcgtgtgcctggtgctggatgtggccccacctggactggacagccccatctggtttagcgccggcaatggctctgccctggacgcctttacctacggcccaagccctgccaccgatggcacctggacaaatctggcccacctgagcctgcccagcgaggaactggcttcttgggagcctctcgtgtgccacacaggacctggcgctgagggacacagcagatccacccagcctatgcacctgtctggcgaggccagcaccgccagaacctgtcctcaggaacctctgagaggcacccctggcggagcactgtggctgggagtgctgagactgctgctgttcaagctgctgctgtttgacctgctgctgacctgctcctgtctgtgcgatcctgccggccctctgccttctcctgccaccaccacaagactgagagccctgggcagccacagactgcaccctgccacagagacaggcggcagagaggccacaagcagccctagaccccagcccagagacagaagatggggcgataccccccctggcagaaagcctggatctccagtc

SEQ ID NO: 470 - DNA, 567 bp, Artificial Sequence
  Synthetic Polynucleotide
gataaacaacttgatgcagatgtttcccccaagcccactatttttcttccttcaattgctgaaacaaaactccagaaggctggaacatacctttgtcttcttgagaaatttttcccagatattattaagatacattggcaagaaaagaagagcaacacgattctgggatcccaggaggggaacaccatgaagactaacgacacatacatgaaatttagctggttaacggtgccagaagagtcactggacaaagaacacagatgtatcgtcagacatgagaataataaaaacggaattgatcaagaaattatctttcctccaataaagacagatgtcaccacagtggatcccaaatacaattattcaaaggatgcaaatgatgtcatcacaatggatcccaaagacaattggtcaaaagatgcaaatgatacactactgctgcagctcacaaacacctctgcatattacatgtacctcctcctgctcctcaagagtgtggtctattttgccatcatcacctgctgtctgcttggaagaacggctttctgctgcaatggagagaaatca

SEQ ID NO: 471 - DNA, 519 bp, Artificial Sequence
  Synthetic Polynucleotide
gacaagcagctggacgccgacgtgtcccccaagcctaccatcttcctgccctctatcgccgagacaaagctccagaaggccggcacctacctgtgcctgctggaaaagttcttcccagatgtgattaagatccactggcaggaaaagaagtccaacaccatcctgggcagccaggaaggcaacaccatgaagaccaacgacacctacatgaagttcagctggctgaccgtgcccgagaagtccctggacaaagaacacagatgcatcgtgcggcacgaaaacaacaagaacggcgtggaccaggaaatcatcttcccacccatcaagaccgatgtgattacaatggaccccaaggacaactgctccaaggacgccaacgataccctgctgctccagctgaccaacaccagcgcctactacatgtacttgttgctgctgctgaagtccgtggtgtacttcgccatcatcacatgctgcctgctgcggagaaccgccttctgctgcaacggcgagaagtct

SEQ ID NO: 472 - DNA, 459 bp, Artificial Sequence
  Synthetic Polynucleotide
agtcagcctcataccaaaccatccgtttttgtcatgaaaaatggaacaaatgtcgcttgtctggtgaaggaattctaccccaaggatataagaataaatctcgtgtcatccaagaagataacagagtttgatcctgctattgtcatctctcccagtgggaagtacaatgctgtcaagcttggtaaatatgaagattcaaattcagtgacatgttcagttcaacacgacaataaaactgtgcactccactgactttgaagtgaagacagattctacagatcacgtaaaaccaaaggaaactgaaaacacaaagcaaccttcaaagagctgccataaacccaaagccatagttcataccgagaaggtgaacatgatgtccctcacagtgcttgggctacgaatgctgtttgcaaagactgttgccgtcaattttctcttgactgccaagttatttttcttg

SEQ ID NO: 473 - DNA, 459 bp, Artificial Sequence
  Synthetic Polynucleotide
agccagcctcacaccaagcccagcgtgttcgtgatgaagaacggcaccaacgtggcctgcctcgtgaaagagttctaccccaaggacatcaggatcaacctggtgtccagcaagaagatcaccgagttcgaccccgccatcgtgatctcccccagcggcaagtacaacgccgtgaagctggggaagtacgaggacagcaacagcgtgacctgctccgtgcagcacgacaacaagaccgtgcacagcaccgactttgaagtgaaaaccgactccaccgaccacgtgaagcccaaagagacagagaacaccaagcagcccagcaagagctgccacaagcccaaggccatcgtgcacaccgagaaagtgaacatgatgagcctgaccgtgctgggcctgcggatgctgttcgccaaaaccgtggccgtgaacttcctgctgaccgccaagctgttcttcctc

SEQ ID NO: 474 - DNA, 597 bp, Artificial Sequence
  Synthetic Polynucleotide
atgaccgagtacaagcccacggtgcgcctcgccacccgcgacgacgtccccagggccgtacgcaccctcgccgccgcgttcgccgactaccccgccacgcgccacaccgtcgatccggaccgccacatcgagcgggtcaccgagctgcaagaactcttcctcacgcgcgtcgggctcgacatcggcaaggtgtgggtcgcggacgacggcgccgcggtggcggtctggaccacgccggagagcgtcgaagcgggggcggtgttcgccgagatcggcccgcgcatggccgagttgagcggttcccggctggccgcgcagcaacagatggaaggcctcctggcgccgcaccggcccaaggagcccgcgtggttcctggccaccgtcggcgtctcgcccgaccaccagggcaagggtctgggcagcgccgtcgtgctccccggagtggaggcggccgagcgcgccggggtgcccgccttcctggagacctccgcgccccgcaacctccccttctacgagcggctcggcttcaccgtcaccgccgacgtcgaggtgcccgaaggaccgcgcacctggtgcatgacccgcaagcccggtgcc

SEQ ID NO: 475 - DNA, 396 bp, Artificial Sequence
  Synthetic Polynucleotide
atggccaagcctttgtctcaagaagaatccaccctcattgaaagagcaacggctacaatcaacagcatccccatctctgaagactacagcgtcgccagcgcagctctctctagcgacggccgcatcttcactggtgtcaatgtatatcattttactgggggaccttgtgcagaactcgtggtgctgggcactgctgctgctgcggcagctggcaacctgacttgtatcgtcgcgatcggaaatgagaacaggggcatcttgagcccctgcggacggtgccgacaggtgcttctcgatctgcatcctgggatcaaagccatagtgaaggacagtgatggacagccgacggcagttgggattcgtgaattgctgccctctggttatgtgtgggagggc

SEQ ID NO: 476 - DNA, 2157 bp, Artificial Sequence
  Synthetic Polynucleotide
atggccttaccagtgaccgccttgctcctgccgctggccttgctgctccacgccgccaggccggacatccagatgacacagactacatcctccctgtctgcctctctgggagacagagtcaccatcagttgcagggcaagtcaggacattagtaaatatttaaattggtatcagcagaaaccagatggaactgttaaactcctgatctaccatacatcaagattacactcaggagtcccatcaaggttcagtggcagtgggtctggaacagattattctctcaccattagcaacctggagcaagaagatattgccacttacttttgccaacagggtaatacgcttccgtacacgttcggaggggggaccaagctggagatcacaggtggcggtggctcgggcggtggtgggtcgggtggcggcggatctgaggtgaaactgcaggagtcaggacctggcctggtggcgccctcacagagcctgtccgtcacatgcactgtctcaggggtctcattacccgactatggtgtaagctggattcgccagcctccacgaaagggtctggagtggctgggagtaatatggggtagtgaaaccacatactataattcagctctcaaatccagactgaccatcatcaaggacaactccaagagccaagttttcttaaaaatgaacagtctgcaaactgatgacacagccatttactactgtgccaaacattattactacggtggtagctatgctatggactactggggtcaaggaacctcagtcaccgtctcctcacgcgtagagcagaaactgatctcggaagaggatctgaaaattgaagttatgtatcctcctccttacctagacaatgagaagagcaatggaaccattatccatgtgaaagggaaacacctttgtccaagtcccctatttcccggaccttctaagcccttttgggtgctggtggtggttgggggagtcctggcttgctatagcttgctagtaacagtggcctttattattttctgggtgaggagtaagaggagcaggctcctgcacagtgactacatgaacatgactccacgccgccccggacccacccgcaagcattaccagccctatgccccaccacgcgacttcgcagcctatcgctccagagtgaagttcagcaggagcgcagacgcccccgcgtaccagcagggccagaaccagctctataacgagctcaatctaggacgaagagaggagtacgatgttttggacaagagacgtggccgggaccctgagatggggggaaagccgagaaggaagaaccctcaggaaggcctgtacaatgaactgcagaaagataagatggcggaggcctacagtgagattgggatgaaaggcgagcgccggaggggcaaggggcacgatggcctttaccagggtctcagtacagccaccaaggacacctacgacgcccttcacatgcaggccctgccccctcgctctagtggctccggcgagggcagaggaagtctactaacctgcggagatgtggaagaaaatcctggcccacatatgaccgagtacaagcccacggtgcgcctcgccacccgcgacgacgtccccagggccgtacgcaccctcgccgccgcgttcgccgactaccccgccacgcgccacaccgtcgatccggaccgccacatcgagcgggtcaccgagctgcaagaactcttcctcacgcgcgtcgggctcgacatcggcaaggtgtgggtcgcggacgacggcgccgcggtggcggtctggaccacgccggagagcgtcgaagcgggggcggtgttcgccgagatcggcccgcgcatggccgagttgagcggttcccggctggccgcgcagcaacagatggaaggcctcctggcgccgcaccggcccaaggagcccgcgtggttcctggccaccgtcggcgtctcgcccgaccaccagggcaagggtctgggcagcgccgtcgtgctccccggagtggaggcggccgagcgcgccggggtgcccgccttcctggagacctccgcgccccgcaacctccccttctacgagcggctcggcttcaccgtcaccgccgacgtcgaggtgcccgaaggaccgcgcacctggtgcatgacccgcaagcccggtgcctga

SEQ ID NO: 477 - DNA, 2175 bp, Artificial Sequence
  Synthetic Polynucleotide
atggccttaccagtgaccgccttgctcctgccgctggccttgctgctccacgccgccaggccggacatccagatgacacagactacatcctccctgtctgcctctctgggagacagagtcaccatcagttgcagggcaagtcaggacattagtaaatatttaaattggtatcagcagaaaccagatggaactgttaaactcctgatctaccatacatcaagattacactcaggagtcccatcaaggttcagtggcagtgggtctggaacagattattctctcaccattagcaacctggagcaagaagatattgccacttacttttgccaacagggtaatacgcttccgtacacgttcggaggggggaccaagctggagatcacaggtggcggtggctcgggcggtggtgggtcgggtggcggcggatctgaggtgaaactgcaggagtcaggacctggcctggtggcgccctcacagagcctgtccgtcacatgcactgtctcaggggtctcattacccgactatggtgtaagctggattcgccagcctccacgaaagggtctggagtggctgggagtaatatggggtagtgaaaccacatactataattcagctctcaaatccagactgaccatcatcaaggacaactccaagagccaagttttcttaaaaatgaacagtctgcaaactgatgacacagccatttactactgtgccaaacattattactacggtggtagctatgctatggactactggggtcaaggaacctcagtcaccgtctcctcacgcgtagagcagaaactgatctcggaagaggatctggcgaagcccaccacgacgccagcgccgcgaccaccaacaccggcgcccaccatcgcgtcgcagcccctgtccctgcgcccagaggcgtgccggccagcggcggggggcgcagtgcacacgagggggctggacttcgcctgtgacatctacatctgggcgcccttggccgggacttgtggggtccttctcctgtcactggttatcaccctttactgcaaacggggcagaaagaaactcctgtatatattcaaacaaccatttatgagaccagtacaaactactcaagaggaagatggctgtagctgccgatttccagaagaagaagaaggaggatgtgaactgagagtgaagttcagcaggagcgcagacgcccccgcgtaccagcagggccagaaccagctctataacgagctgaatctaggacgaagagaggagtacgatgttttggacaagagacgtggccgggaccctgagatggggggaaagccgagaaggaagaaccctcaggaaggcctgtacaatgaactgcagaaagataagatggcggaggcctacagtgagattgggatgaaaggcgagcgccggaggggcaaggggcacgatggcctttaccagggtctcagtacagccaccaaggacacctacgacgcccttcacatgcaggccctgccccctcgctctagtggctccggcgagggcagaggaagtctactaacctgcggagatgtggaagaaaatcctggcccacatatgaccgagtacaagcccacggtgcgcctcgccacccgcgacgacgtccccagggccgtacgcaccctcgccgccgcgttcgccgactaccccgccacgcgccacaccgtcgatccggaccgccacatcgagcgggtcaccgagctgcaagaactcttcctcacgcgcgtcgggctcgacatcggcaaggtgtgggtcgcggacgacggcgccgcggtggcggtctggaccacgccggagagcgtcgaagcgggggcggtgttcgccgagatcggcccgcgcatggccgagttgagcggttcccggctggccgcgcagcaacagatggaaggcctcctggcgccgcaccggcccaaggagcccgcgtggttcctggccaccgtcggcgtctcgcccgaccaccagggcaagggtctgggcagcgccgtcgtgctccccggagtggaggcggccgagcgcgccggggtgcccgccttcctggagacctccgcgccccgcaacctccccttctacgagcggctcggcttcaccgtcaccgccgacgtcgaggtgcccgaaggaccgcgcacctggtgcatgacccgcaagcccggtgcctga

SEQ ID NO: 478 - DNA, 2184 bp, Artificial Sequence
  Synthetic Polynucleotide
atggccttaccagtgaccgccttgctcctgccgctggccttgctgctccacgccgccaggccggacgagatcgtgctgacacagagccctgccaccctgtctctgagccctggcgaaagagccaccctgagctgtagagccagccagagcgtgtccagctacctggcctggtatcagcagaagcccggccaggctccccggctgctgatctacgatgccagcaatagagccaccggcatccccgccagattttccggctctggcagcggcaccgacttcaccctgaccatcagctccctggaacccgaggacttcgccgtgtactactgccagcagcggagcaactggcccatcacattcggccagggcacccggctggaaatcaaaggcggaggcggaagtggaggcggaggatctggcggcggaggctctgaagtgcagctggtggaatcaggcggcggactggtgcagcctggcagaagcctgagactgagctgtgccgccagcggcttcaccttcaacgactacgccatgcactgggtgcgccaggcccctggaaaaggactggaatgggtgtccacaatcagctggaacagcggcagcatcggctacgccgatagcgtgaagggccggttcaccatcagccgggacaacgccaagaagtccctgtacctccagatgaacagcctgcgggccgaggacacagccctgtactattgcgccaaggacatccagtacggcaactactactacggcatggacgtgtggggccagggaaccaccgtgaccgtgtcatctacgcgtgagcagaaactgatctcggaagaggatctggcgaagcccaccacgacgccagcgccgcgaccaccaacaccggcgcccaccatcgcgtcgcagcccctgtccctgcgcccagaggcgtgccggccagcggcggggggcgcagtgcacacgagggggctggacttcgcctgtgacatctacatctgggcgcccttggccgggacttgtggggtccttctcctgtcactggttatcaccctttactgcaaacggggcagaaagaaactcctgtatatattcaaacaaccatttatgagaccagtacaaactactcaagaggaagatggctgtagctgccgatttccagaagaagaagaaggaggatgtgaactgagagtgaagttcagcaggagcgcagacgcccccgcgtaccagcagggccagaaccagctctataacgagctgaatctaggacgaagagaggagtacgatgttttggacaagagacgtggccgggaccctgagatggggggaaagccgagaaggaagaaccctcaggaaggcctgtacaatgaactgcagaaagataagatggcggaggcctacagtgagattgggatgaaaggcgagcgccggaggggcaaggggcacgatggcctttaccagggtctcagtacagccaccaaggacacctacgacgcccttcacatgcaggccctgccccctcgctctagtggctccggcgagggcagaggaagtctactaacctgcggagatgtggaagaaaatcctggcccacatatgaccgagtacaagcccacggtgcgcctcgccacccgcgacgacgtccccagggccgtacgcaccctcgccgccgcgttcgccgactaccccgccacgcgccacaccgtcgatccggaccgccacatcgagcgggtcaccgagctgcaagaactcttcctcacgcgcgtcgggctcgacatcggcaaggtgtgggtcgcggacgacggcgccgcggtggcggtctggaccacgccggagagcgtcgaagcgggggcggtgttcgccgagatcggcccgcgcatggccgagttgagcggttcccggctggccgcgcagcaacagatggaaggcctcctggcgccgcaccggcccaaggagcccgcgtggttcctggccaccgtcggcgtctcgcccgaccaccagggcaagggtctgggcagcgccgtcgtgctccccggagtggaggcggccgagcgcgccggggtgcccgccttcctggagacctccgcgccccgcaacctccccttctacgagcggctcggcttcaccgtcaccgccgacgtcgaggtgcccgaaggaccgcgcacctggtgcatgacccgcaagcccggtgcctga

SEQ ID NO: 479 - DNA, 2649 bp, Artificial Sequence
  Synthetic Polynucleotide
atggccttaccagtgaccgccttgctcctgccgctggccttgctgctccacgccgccaggccggacatccagatgacacagactacatcctccctgtctgcctctctgggagacagagtcaccatcagttgcagggcaagtcaggacattagtaagtacctgaactggtatcagcagaaaccagatggaactgttaaactcctgatctaccatacatcaagattacactcaggagtcccatcaaggttcagtggcagtgggtctggaacagattattctctcaccattagcaacctggagcaagaagatattgccacttacttttgccaacagggtaatacgcttccgtacacgttcggaggggggaccaagctggagatcacactcgaggggaaaccaattcccaaccctcttctgggactggattcaaccggcagcggcgaggacctgaagaacgtgttcccacctgaggtggccgtgttcgagcctagcaaggccgagatcgcccacacccagaaagccaccctcgtgtgcctggctaccggcttctaccccgaccatgtggaactgtcttggtgggtcaacggcaaagaggtgcacagcggcgtgtgtaccgacccccagccactgaaagaacagcccgccctgaacgacagccggtactgcctgagcagcagactgagagtgtccgccaccttctggcagaacccccggaaccacttcagatgccaggtgcagttctacggcctgagcgagaacgacgagtggacccaggacagagccaagcccgtgacccagatcgtgtctgccgaagcctggggcagagccgattgcggcatcaccagcgccagctaccaccagggcgtgctgagcgccaccatcctgtacgagatcctgctgggcaaggccaccctgtacgccgtgctggtgtctgccctggtgctgatggctatggtcaagcggaaggacagccggggaagggccaagcgatctggatctggagcaacaaacttctcactactcaaacaagcaggtgacgtggaggagaatcccgggcctactagtatggactggatttggcgcatccttttccttgtcggcgctgctaccggcgcgcattccttcgaagtgaaactgcaggagtcaggacctggcctggtggcgccctcacagagcctgtccgtcacatgcactgtctcaggggtctcattacccgactatggtgtaagctggattcgccagcctccacgaaagggtctggagtggctgggagtaatatggggtagtgaaaccacatactataattcagctctcaaatccagactgaccatcatcaaggacaactccaagagccaagttttcttaaaaatgaacagtctgcaaactgatgacacagccatttactactgtgccaaacattattactacggtggtagctatgctatggactactggggccaaggaacctcagtcaccgtctcctcaacgcgtgagcagaaactgatctcggaagaggatgggagcggcatccagaaccctgatcctgccgtgtaccagctgcgggatagcaagagcagcgacaagagcgtgtgtctgttcaccgacttcgacagccagaccaacgtgtcccagagcaaggactccgacgtgtacatcaccgataagtgcgtgctggacatgcggagcatggacttcaagagcaactccgccgtggcctggtccaacaagtccgatttcgcctgcgccaacgccttcaacaacagcattatccccgaggacacattcttcccaagcagcgacgtgccctgcgacgtgaagctggtggaaaagagcttcgagacagacaccaacctgaacttccagaacctgagcgtgatcggcttcagaatcctgctgctgaaagtggccggctttaacctgctgatgaccctgcggctgtggtccagccgcgccaagagaagcggatctggcgtgaagcagaccctgaatttcgacctgctgaagctggctggcgacgtggaatccaacccaggcccttctagaggccatatgaccgagtacaagcccacggtgcgcctcgccacccgcgacgacgtccccagggccgtacgcaccctcgccgccgcgttcgccgactaccccgccacgcgccacaccgtcgatccggaccgccacatcgagcgggtcaccgagctgcaagaactcttcctcacgcgcgtcgggctcgacatcggcaaggtgtgggtcgcggacgacggcgccgcggtggcggtctggaccacgccggagagcgtcgaagcgggggcggtgttcgccgagatcggcccgcgcatggccgagttgagcggttcccggctggccgcgcagcaacagatggaaggcctcctggcgccgcaccggcccaaggagcccgcgtggttcctggccaccgtcggcgtctcgcccgaccaccagggcaagggtctgggcagcgccgtcgtgctccccggagtggaggcggccgagcgcgccggggtgcccgccttcctggagacctccgcgccccgcaacctccccttctacgagcggctcggcttcaccgtcaccgccgacgtcgaggtgcccgaaggaccgcgcacctggtgcatgacccgcaagcccggtgcctga

SEQ ID NO: 480 - DNA, 2661 bp, Artificial Sequence
  Synthetic Polynucleotide
atggccttaccagtgaccgccttgctcctgccgctggccttgctgctccacgccgccaggccggacgagatcgtgctgacacagagccctgccaccctgtctctgagccctggcgaaagagccaccctgagctgtagagccagccagagcgtgtccagctacctggcctggtatcagcagaagcccggccaggctccccggctgctgatctacgatgccagcaatagagccaccggcatccccgccagattttccggctctggcagcggcaccgacttcaccctgaccatcagctccctggaacccgaggacttcgccgtgtactactgccagcagcggagcaactggcccatcacattcggccagggcacccggctggaaatcaaactcgaggggaaaccaattcccaaccctcttctgggactggattcaaccggcagcggcgaggacctgaagaacgtgttcccacctgaggtggccgtgttcgagcctagcaaggccgagatcgcccacacccagaaagccaccctcgtgtgcctggctaccggcttctaccccgaccatgtggaactgtcttggtgggtcaacggcaaagaggtgcacagcggcgtgtgtaccgacccccagccactgaaagaacagcccgccctgaacgacagccggtactgcctgagcagcagactgagagtgtccgccaccttctggcagaacccccggaaccacttcagatgccaggtgcagttctacggcctgagcgagaacgacgagtggacccaggacagagccaagcccgtgacccagatcgtgtctgccgaagcctggggcagagccgattgcggcatcaccagcgccagctaccaccagggcgtgctgagcgccaccatcctgtacgagatcctgctgggcaaggccaccctgtacgccgtgctggtgtctgccctggtgctgatggctatggtcaagcggaaggacagccggggaagggccaagcgatctggatctggagcaacaaacttctcactactcaaacaagcaggtgacgtggaggagaatcccgggcctactagtatggactggatttggcgcatccttttccttgtcggcgctgctaccggcgcgcattccttcgaagaagtgcagctggtggaatcaggcggcggactggtgcagcctggcagaagcctgagactgagctgtgccgccagcggcttcaccttcaacgactacgccatgcactgggtgcgccaggcccctggaaaaggactggaatgggtgtccacaatcagctggaacagcggcagcatcggctacgccgatagcgtgaagggccggttcaccatcagccgggacaacgccaagaagtccctgtacctccagatgaacagcctgcgggccgaggacacagccctgtactattgcgccaaggacatccagtacggcaactactactacggcatggacgtgtggggccagggaaccaccgtgaccgtgtcatctacgcgtgagcagaaactgatctcggaagaggatgggagcggcatccagaaccctgatcctgccgtgtaccagctgcgggatagcaagagcagcgacaagagcgtgtgtctgttcaccgacttcgacagccagaccaacgtgtcccagagcaaggactccgacgtgtacatcaccgataagtgcgtgctggacatgcggagcatggacttcaagagcaactccgccgtggcctggtccaacaagtccgatttcgcctgcgccaacgccttcaacaacagcattatccccgaggacacattcttcccaagcagcgacgtgccctgcgacgtgaagctggtggaaaagagcttcgagacagacaccaacctgaacttccagaacctgagcgtgatcggcttcagaatcctgctgctgaaagtggccggctttaacctgctgatgaccctgcggctgtggtccagccgcgccaagagaagcggatctggcgtgaagcagaccctgaatttcgacctgctgaagctggctggcgacgtggaatccaacccaggcccttctagaggccatatgaccgagtacaagcccacggtgcgcctcgccacccgcgacgacgtccccagggccgtacgcaccctcgccgccgcgttcgccgactaccccgccacgcgccacaccgtcgatccggaccgccacatcgagcgggtcaccgagctgcaagaactcttcctcacgcgcgtcgggctcgacatcggcaaggtgtgggtcgcggacgacggcgccgcggtggcggtctggaccacgccggagagcgtcgaagcgggggcggtgttcgccgagatcggcccgcgcatggccgagttgagcggttcccggctggccgcgcagcaacagatggaaggcctcctggcgccgcaccggcccaaggagcccgcgtggttcctggccaccgtcggcgtctcgcccgaccaccagggcaagggtctgggcagcgccgtcgtgctccccggagtggaggcggccgagcgcgccggggtgcccgccttcctggagacctccgcgccccgcaacctccccttctacgagcggctcggcttcaccgtcaccgccgacgtcgaggtgcccgaaggaccgcgcacctggtgcatgacccgcaagcccggtgcctga

SEQ ID NO: 481 - DNA, 2745 bp, Artificial Sequence
  Synthetic Polynucleotide
atggccttaccagtgaccgccttgctcctgccgctggccttgctgctccacgccgccaggccggacatccagatgacacagactacatcctccctgtctgcctctctgggagacagagtcaccatcagttgcagggcaagtcaggacattagtaaatatttaaattggtatcagcagaaaccagatggaactgttaaactcctgatctaccatacatcaagattacactcaggagtcccatcaaggttcagtggcagtgggtctggaacagattattctctcaccattagcaacctggagcaagaagatattgccacttacttttgccaacagggtaatacgcttccgtacacgttcggaggggggaccaagctggagatcacaggtggcggtggctcgggcggtggtgggtcgggtggcggcggatctgaggtgaaactgcaggagtcaggacctggcctggtggcgccctcacagagcctgtccgtcacatgcactgtctcaggggtctcattacccgactatggtgtaagctggattcgccagcctccacgaaagggtctggagtggctgggagtaatatggggtagtgaaaccacatactataattcagctctcaaatccagactgaccatcatcaaggacaactccaagagccaagttttcttaaaaatgaacagtctgcaaactgatgacacagccatttactactgtgccaaacattattactacggtggtagctatgctatggactactggggtcaaggaacctcagtcaccgtctcctcacgcgtagagcagaaactgatctcggaagaggatctggcgaagcccaccacgacgccagcgccgcgaccaccaacaccggcgcccaccatcgcgtcgcagcccctgtccctgcgcccagaggcgtgccggccagcggcggggggcgcagtgcacacgagggggctggacttcgcctgtgacatctacatctgggcgcccttggccgggacttgtggggtccttctcctgtcactggttatcaccctttactgcgggcgcgccagagtgaagttcagcaggagcgcagacgcccccgcgtaccagcagggccagaaccagctctataacgagctgaatctaggacgaagagaggagtacgatgttttggacaagagacgtggccgggaccctgagatggggggaaagccgagaaggaagaaccctcaggaaggcctgtacaatgaactgcagaaagataagatggcggaggcctacagtgagattgggatgaaaggcgagcgccggaggggcaaggggcacgatggcctttaccagggtctcagtacagccaccaaggacacctacgacgcccttcacatgcaggccctgccccctcgctctagaggatctggagcaacaaacttctcactactcaaacaagcaggtgacgtggaggagaatcccgggcctgggatccacatggccacttacgaggttctctgtgaggtggcgcggaaactgggcacggatgacagggaagtggtattgttcctcctaaacgtgttcatacctcaacccacactggcccaattaattggagctcttagagctttaaaggaggagggcaggttaacgtttcccctgttagcggaatgtctgtttcgtgcaggtcgcagagacctcttgcgcgacctgcttcacttagacccgcgttttttagagcgccacctagcgggcacaatgagttatttcagcccttatcagctcactgttctccacgtagacggggagctgtgtgcgagggatattaggtctttgatatttttaagcaaggacactatagggtctcgcagcacaccacagacattcttacactgggtgtactgtatggaaaacttagacctactgggtcccactgacgtggatgccctaatgtcaatgcttagatctttgtcaagagtagacctacagcgccaagtgcaaaccctaatgggccttcacctttccggcccatcacactcccaacactatcgccatacaccactcgagaccgatttctacgactacaaggacgacgatgacaagactagtggctccggcgagggcagaggaagtctactaacctgcggagatgtggaagaaaatcctggcccacatatgaccgagtacaagcccacggtgcgcctcgccacccgcgacgacgtccccagggccgtacgcaccctcgccgccgcgttcgccgactaccccgccacgcgccacaccgtcgatccggaccgccacatcgagcgggtcaccgagctgcaagaactcttcctcacgcgcgtcgggctcgacatcggcaaggtgtgggtcgcggacgacggcgccgcggtggcggtctggaccacgccggagagcgtcgaagcgggggcggtgttcgccgagatcggcccgcgcatggccgagttgagcggttcccggctggccgcgcagcaacagatggaaggcctcctggcgccgcaccggcccaaggagcccgcgtggttcctggccaccgtcggcgtctcgcccgaccaccagggcaagggtctgggcagcgccgtcgtgctccccggagtggaggcggccgagcgcgccggggtgcccgccttcctggagacctccgcgccccgcaacctccccttctacgagcggctcggcttcaccgtcaccgccgacgtcgaggtgcccgaaggaccgcgcacctggtgcatgacccgcaagcccggtgcctga

SEQ ID NO: 482 - DNA, 2754 bp, Artificial Sequence
  Synthetic Polynucleotide
atggccttaccagtgaccgccttgctcctgccgctggccttgctgctccacgccgccaggccggacgagatcgtgctgacacagagccctgccaccctgtctctgagccctggcgaaagagccaccctgagctgtagagccagccagagcgtgtccagctacctggcctggtatcagcagaagcccggccaggctccccggctgctgatctacgatgccagcaatagagccaccggcatccccgccagattttccggctctggcagcggcaccgacttcaccctgaccatcagctccctggaacccgaggacttcgccgtgtactactgccagcagcggagcaactggcccatcacattcggccagggcacccggctggaaatcaaaggcggaggcggaagtggaggcggaggatctggcggcggaggctctgaagtgcagctggtggaatcaggcggcggactggtgcagcctggcagaagcctgagactgagctgtgccgccagcggcttcaccttcaacgactacgccatgcactgggtgcgccaggcccctggaaaaggactggaatgggtgtccacaatcagctggaacagcggcagcatcggctacgccgatagcgtgaagggccggttcaccatcagccgggacaacgccaagaagtccctgtacctccagatgaacagcctgcgggccgaggacacagccctgtactattgcgccaaggacatccagtacggcaactactactacggcatggacgtgtggggccagggaaccaccgtgaccgtgtcatctacgcgtgagcagaaactgatctcggaagaggatctggcgaagcccaccacgacgccagcgccgcgaccaccaacaccggcgcccaccatcgcgtcgcagcccctgtccctgcgcccagaggcgtgccggccagcggcggggggcgcagtgcacacgagggggctggacttcgcctgtgacatctacatctgggcgcccttggccgggacttgtggggtccttctcctgtcactggttatcaccctttactgcgggcgcgccagagtgaagttcagcaggagcgcagacgcccccgcgtaccagcagggccagaaccagctctataacgagctgaatctaggacgaagagaggagtacgatgttttggacaagagacgtggccgggaccctgagatggggggaaagccgagaaggaagaaccctcaggaaggcctgtacaatgaactgcagaaagataagatggcggaggcctacagtgagattgggatgaaaggcgagcgccggaggggcaaggggcacgatggcctttaccagggtctcagtacagccaccaaggacacctacgacgcccttcacatgcaggccctgccccctcgctctagaggatctggagcaacaaacttctcactactcaaacaagcaggtgacgtggaggagaatcccgggcctgggatccacatggccacttacgaggttctctgtgaggtggcgcggaaactgggcacggatgacagggaagtggtattgttcctcctaaacgtgttcatacctcaacccacactggcccaattaattggagctcttagagctttaaaggaggagggcaggttaacgtttcccctgttagcggaatgtctgtttcgtgcaggtcgcagagacctcttgcgcgacctgcttcacttagacccgcgttttttagagcgccacctagcgggcacaatgagttatttcagcccttatcagctcactgttctccacgtagacggggagctgtgtgcgagggatattaggtctttgatatttttaagcaaggacactatagggtctcgcagcacaccacagacattcttacactgggtgtactgtatggaaaacttagacctactgggtcccactgacgtggatgccctaatgtcaatgcttagatctttgtcaagagtagacctacagcgccaagtgcaaaccctaatgggccttcacctttccggcccatcacactcccaacactatcgccatacaccactcgagaccgatttctacgactacaaggacgacgatgacaagactagtggctccggcgagggcagaggaagtctactaacctgcggagatgtggaagaaaatcctggcccacatatgaccgagtacaagcccacggtgcgcctcgccacccgcgacgacgtccccagggccgtacgcaccctcgccgccgcgttcgccgactaccccgccacgcgccacaccgtcgatccggaccgccacatcgagcgggtcaccgagctgcaagaactcttcctcacgcgcgtcgggctcgacatcggcaaggtgtgggtcgcggacgacggcgccgcggtggcggtctggaccacgccggagagcgtcgaagcgggggcggtgttcgccgagatcggcccgcgcatggccgagttgagcggttcccggctggccgcgcagcaacagatggaaggcctcctggcgccgcaccggcccaaggagcccgcgtggttcctggccaccgtcggcgtctcgcccgaccaccagggcaagggtctgggcagcgccgtcgtgctccccggagtggaggcggccgagcgcgccggggtgcccgccttcctggagacctccgcgccccgcaacctccccttctacgagcggctcggcttcaccgtcaccgccgacgtcgaggtgcccgaaggaccgcgcacctggtgcatgacccgcaagcccggtgcctga

SEQ ID NO: 483 - DNA, 33 bp, Artificial Sequence
  Synthetic Polynucleotide
tggtctcatccccagtttgaaaagggcagcggc

SEQ ID NO: 484 - DNA, 4950 bp, Artificial Sequence
  Synthetic Polynucleotide
atggccttaccagtgaccgccttgctcctgccgctggccttgctgctccacgccgccaggccggacatccagatgacacagactacatcctccctgtctgcctctctgggagacagagtcaccatcagttgcagggcaagtcaggacattagtaaatatttaaattggtatcagcagaaaccagatggaactgttaaactcctgatctaccatacatcaagattacactcaggagtcccatcaaggttcagtggcagtgggtctggaacagattattctctcaccattagcaacctggagcaagaagatattgccacttacttttgccaacagggtaatacgcttccgtacacgttcggaggggggaccaagctggagatcacaggtggcggtggctcgggcggtggtgggtcgggtggcggcggatctgaggtgaaactgcaggagtcaggacctggcctggtggcgccctcacagagcctgtccgtcacatgcactgtctcaggggtctcattacccgactatggtgtaagctggattcgccagcctccacgaaagggtctggagtggctgggagtaatatggggtagtgaaaccacatactataattcagctctcaaatccagactgaccatcatcaaggacaactccaagagccaagttttcttaaaaatgaacagtctgcaaactgatgacacagccatttactactgtgccaaacattattactacggtggtagctatgctatggactactggggtcaaggaacctcagtcaccgtctcctcacgcgtagagcagaaactgatctcggaagaggatctggcgaagcccaccacgacgccagcgccgcgaccaccaacaccggcgcccaccatcgcgtcgcagcccctgtccctgcgcccagaggcgtgccggccagcggcggggggcgcagtgcacacgagggggctggacttcgcctgtgacatctacatctgggcgcccttggccgggacttgtggggtccttctcctgtcactggttatcaccctttactgcaaacggggcagaaagaaactcctgtatatattcaaacaaccatttatgagaccagtacaaactactcaagaggaagatggctgtagctgccgatttccagaagaagaagaaggaggatgtgaactgagagtgaagttcagcaggagcgcagacgcccccgcgtaccagcagggccagaaccagctctataacgagctgaatctaggacgaagagaggagtacgatgttttggacaagagacgtggccgggaccctgagatggggggaaagccgagaaggaagaaccctcaggaaggcctgtacaatgaactgcagaaagataagatggcggaggcctacagtgagattgggatgaaaggcgagcgccggaggggcaaggggcacgatggcctttaccagggtctcagtacagccaccaaggacacctacgacgcccttcacatgcaggccctgccccctcgctctagtggctccggcgagggcagaggaagtctactaacctgcggagatgtggaagaaaatcctggcccacatatggcacctccaagtgaagagacgcccctgatccctcagcgttcatgcagcctcttgtccacggaggctggtgccctgcatgtgctgctgcccgctcggggccccgggcccccccagcgcctatctttctcctttggggaccacttggctgaggacctgtgcgtgcaggctgccaaggccagcggcatcctgcctgtgtaccactccctctttgctctggccacggaggacctgtcctgctggttccccccgagccacatcttctccgtggaggatgccagcacccaagtcctgctgtacaggattcgcttttacttccccaattggtttgggctggagaagtgccaccgcttcgggctacgcaaggatttggccagtgctatccttgacctgccagtcctggagcacctctttgcccagcaccgcagtgacctggtgagtgggcgcctccccgtgggcctcagtctcaaggagcagggtgagtgtctcagcctggccgtgttggacctggcccggatggcgcgagagcaggcccagcggccgggagagctgctgaagactgtcagctacaaggcctgcctacccccaagcctgcgcgacctgatccagggcctgagcttcgtgacgcggaggcgtattcggaggacggtgcgcagagccctgcgccgcgtggccgcctgccaggcagaccggcactcgctcatggccaagtacatcatggacctggagcggctggatccagccggggccgccgagaccttccacgtgggcctccctggggcccttggtggccacgacgggctggggctgctccgcgtggctggtgacggcggcatcgcctggacccagggagaacaggaggtcctccagcccttctgcgactttccagaaatcgtagacattagcatcaagcaggccccgcgcgttggcccggccggagagcaccgcctggtcactgttaccaggacagacaaccagattttagaggccgagttcccagggctgcccgaggctctgtcgttcgtggcgctcgtggacggctacttccggctgaccacggactcccagcacttcttctgcaaggaggtggcaccgccgaggctgctggaggaagtggccgagcagtgccacggccccatcactctggactttgccatcaacaagctcaagactgggggctcacgtcctggctcctatgttctccgccgcagcccccaggactttgacagcttcctcctcactgtctgtgtccagaacccccttggtcctgattataagggctgcctcatccggcgcagccccacaggaaccttccttctggttggcctcagccgaccccacagcagtcttcgagagctcctggcaacctgctgggatggggggctgcacgtagatggggtggcagtgaccctcacttcctgctgtatccccagacccaaagaaaagtccaacctgatcgtggtccagagaggtcacagcccacccacatcatccttggttcagccccaatcccaataccagctgagtcagatcacatttcacaagatccctgctgacagcctggagtggcatgagaacctgggccatgggtccttcaccaagatttaccggggctgtcgccatgaggtggtggatggggaggcccgaaagacagaggtgctgctgaaggtcatggatgccaagcacaagaactgcatggagtcattcctggaagcagcgagcttgatgagccaagtgtcgtaccggcatctcgtgctgctccacggcgtgtgcatggctggagacagcaccatggtgcaggaatttgtacacctgggggccatagacatgtatctgcgaaaacgtggccacctggtgccagccagctggaagctgcaggtggtcaaacagctggcctacgccctcaactatctggaggacaaaggcctgccccatggcaatgtctctgcccggaaggtgctcctggctcgggagggggctgatgggagcccgcccttcatcaagctgagtgaccctggggtcagccccgctgtgttaagcctggagatgctcaccgacaggatcccctgggtggcccccgagtgtctccgggaggcgcagacacttagcttggaagctgacaagtggggcttcggcgccacggtctgggaagtgtttagtggcgtcaccatgcccatcagtgccctggatcctgctaagaaactccaattttatgaggaccggcagcagctgccggcccccaagtggacagagctggccctgctgattcaacagtgcatggcctatgagccggtccagaggccctccttccgagccgtcattcgtgacctcaatagcctcatctcttcagactatgagctcctctcagaccccacacctggtgccctggcacctcgtgatgggctgtggaatggtgcccagctctatgcctgccaagaccccacgatcttcgaggagagacacctcaagtacatctcacagctgggcaagggcaactttggcagcgtggagctgtgccgctatgacccgctaggcgacaatacaggtgccctggtggccgtgaaacagctgcagcacagcgggccagaccagcagagggactttcagcgggagattcagatcctcaaagcactgcacagtgatttcattgtcaagtatcgtggtgtcagctatggcccgggccgccagagcctgcggctggtcatggagtacctgcccagcggctgcttgcgcgacttcctgcagcggcaccgcgcgcgcctcgatgccagccgcctccttctctattcctcgcagatctgcaagggcatggagtacctgggctcccgccgctgcgtgcaccgcgacctggccgcccgaaacatcctcgtggagagcgaggcacacgtcaagatcgctgacttcggcctagctaagctgctgccgcttgacaaagactactacgtggtccgcgagccaggccagagccccattttctggtatgcccccgaatccctctcggacaacatcttctctcgccagtcagacgtctggagcttcggggtcgtcctgtacgagctcttcacctactgcgacaaaagctgcagcccctcggccgagttcctgcggatgatgggatgtgagcgggatgtccccgccctctgccgcctcttggaactgctggaggagggccagaggctgccggcgcctcctgcctgccctgctgaggttcacgagctcatgaagctgtgctgggcccctagcccacaggaccggccatcattcagcgccctgggcccccagctggacatgctgtggagcggaagccgggggtgtgagactcatgccttcactgctcacccagagggcaaacaccactccctgtccttttcatga

SEQ ID NO: 485 - DNA, 4950 bp, Artificial Sequence
  Synthetic Polynucleotide
atggccttaccagtgaccgccttgctcctgccgctggccttgctgctccacgccgccaggccggacatccagatgacacagactacatcctccctgtctgcctctctgggagacagagtcaccatcagttgcagggcaagtcaggacattagtaaatatttaaattggtatcagcagaaaccagatggaactgttaaactcctgatctaccatacatcaagattacactcaggagtcccatcaaggttcagtggcagtgggtctggaacagattattctctcaccattagcaacctggagcaagaagatattgccacttacttttgccaacagggtaatacgcttccgtacacgttcggaggggggaccaagctggagatcacaggtggcggtggctcgggcggtggtgggtcgggtggcggcggatctgaggtgaaactgcaggagtcaggacctggcctggtggcgccctcacagagcctgtccgtcacatgcactgtctcaggggtctcattacccgactatggtgtaagctggattcgccagcctccacgaaagggtctggagtggctgggagtaatatggggtagtgaaaccacatactataattcagctctcaaatccagactgaccatcatcaaggacaactccaagagccaagttttcttaaaaatgaacagtctgcaaactgatgacacagccatttactactgtgccaaacattattactacggtggtagctatgctatggactactggggtcaaggaacctcagtcaccgtctcctcacgcgtagagcagaaactgatctcggaagaggatctggcgaagcccaccacgacgccagcgccgcgaccaccaacaccggcgcccaccatcgcgtcgcagcccctgtccctgcgcccagaggcgtgccggccagcggcggggggcgcagtgcacacgagggggctggacttcgcctgtgacatctacatctgggcgcccttggccgggacttgtggggtccttctcctgtcactggttatcaccctttactgcaaacggggcagaaagaaactcctgtatatattcaaacaaccatttatgagaccagtacaaactactcaagaggaagatggctgtagctgccgatttccagaagaagaagaaggaggatgtgaactgagagtgaagttcagcaggagcgcagacgcccccgcgtaccagcagggccagaaccagctctataacgagctgaatctaggacgaagagaggagtacgatgttttggacaagagacgtggccgggaccctgagatggggggaaagccgagaaggaagaaccctcaggaaggcctgtacaatgaactgcagaaagataagatggcggaggcctacagtgagattgggatgaaaggcgagcgccggaggggcaaggggcacgatggcctttaccagggtctcagtacagccaccaaggacacctacgacgcccttcacatgcaggccctgccccctcgctctagtggctccggcgagggcagaggaagtctactaacctgcggagatgtggaagaaaatcctggcccacatatggcacctccaagtgaagagacgcccctgatccctcagcgttcatgcagcctcttgtccacggaggctggtgccctgcatgtgctgctgcccgctcggggccccgggcccccccagcgcctatctttctcctttggggaccacttggctgaggacctgtgcgtgcaggctgccaaggccagcggcatcctgcctgtgtaccactccctctttgctctggccacggaggacctgtcctgctggttccccccgagccacatcttctccgtggaggatgccagcacccaagtcctgctgtacaggattcgcttttacttccccaattggtttgggctggagaagtgccaccgcttcgggctacgcaaggatttggccagtgctatccttgacctgccagtcctggagcacctctttgcccagcaccgcagtgacctggtgagtgggcgcctccccgtgggcctcagtctcaaggagcagggtgagtgtctcagcctggccgtgttggacctggcccggatggcgcgagagcaggcccagcggccgggagagctgctgaagactgtcagctacaaggcctgcctacccccaagcctgcgcgacctgatccagggcctgagcttcgtgacgcggaggcgtattcggaggacggtgcgcagagccctgcgccgcgtggccgcctgccaggcagaccggcactcgctcatggccaagtacatcatggacctggagcggctggatccagccggggccgccgagaccttccacgtgggcctccctggggcccttggtggccacgacgggctggggctgctccgcgtggctggtgacggcggcatcgcctggacccagggagaacaggaggtcctccagcccttctgcgactttccagaaatcgtagacattagcatcaagcaggccccgcgcgttggcccggccggagagcaccgcctggtcactgttaccaggacagacaaccagattttagaggccgagttcccagggctgcccgaggctctgtcgttcgtggcgctcgtggacggctacttccggctgaccacggactcccagcacttcttctgcaaggaggtggcaccgccgaggctgctggaggaagtggccgagcagtgccacggccccatcactctggactttgccatcaacaagctcaagactgggggctcacgtcctggctcctatgttctccgccgcagcccccaggactttgacagcttcctcctcactgtctgtgtccagaacccccttggtcctgattataagggctgcctcatccggcgcagccccacaggaaccttccttctggttggcctcagccgaccccacagcagtcttcgagagctcctggcaacctgctgggatggggggctgcacgtagatggggtggcagtgaccctcacttcctgctgtatccccagacccaaagaaaagtccaacctgatcgtggtccagagaggtcacagcccacccacatcatccttggttcagccccaatcccaataccagctgagtcagatgacatttcacaagatccctgctgacagcctggagtggcatgagaacctgggccatgggtccttcaccaagatttaccggggctgtcgccatgaggtggtggatggggaggcccgaaagacagaggtgctgctgaaggtcatggatgccaagcacaagaactgcatggagtcattcctggaagcagtgagcttgatgagccaagtgtcgtaccggcatctcgtgctgctccacggcgtgtgcatggctggagacagcaccatggtgcaggaatttgtacacctgggggccatagacatgtatctgcgaaaacgtggccacctggtgccagccagctggaagctgcaggtggtcaaacagctggcctacgccctcaactatctggaggacaaaggcctgccccatggcaatgtctctgcccggaaggtgctcctggctcgggagggggctgatgggagcccgcccttcatcaagctgagtgaccctggggtcagccccgctgtgttaagcctggagatgctcaccgacaggatcccctgggtggcccccgagtgtctccgggaggcgcagacacttagcttggaagctgacaagtggggcttcggcgccacggtctgggaagtgtttagtggcgtcaccatgcccatcagtgccctggatcctgctaagaaactccaattttatgaggaccggcagcagctgccggcccccaagtggacagagctggccctgctgattcaacagtgcatggcctatgagccggtccagaggccctccttccgagccgtcattcgtgacctcaatagcctcatctcttcagactatgagctcctctcagaccccacacctggtgccctggcacctcgtgatgggctgtggaatggtgcccagctctatgcctgccaagaccccacgatcttcgaggagagacacctcaagtacatctcacagctgggcaagggcaactttggcagcgtggagctgtgccgctatgacccgctaggcgacaatacaggtgccctggtggccgtgaaacagctgcagcacagcgggccagaccagcagagggactttcagcgggagattcagatcctcaaagcactgcacagtgatttcattgtcaagtatcgtggtgtcagctatggcccgggccgccagagcctgcggctggtcatggagtacctgcccagcggctgcttgcgcgacttcctgcagcggcaccgcgcgcgcctcgatgccagccgcctccttctctattcctcgcagatctgcaagggcatggagtacctgggctcccgccgctgcgtgcaccgcgacctggccgcccgaaacatcctcgtggagagcgaggcacacgtcaagatcgctgacttcggcctagctaagctgctgccgcttgacaaagactactacgtggtccgcgagccaggccagagccccattttctggtatgcccccgaatccctctcggacaacatcttctctcgccagtcagacgtctggagcttcggggtcgtcctgtacgagctcttcacctactgcgacaaaagctgcagcccctcggccgagttcctgcggatgatgggatgtgagcgggatgtccccgccctctgccgcctcttggaactgctggaggagggccagaggctgccggcgcctcctgcctgccctgctgaggttcacgagctcatgaagctgtgctgggcccctagcccacaggaccggccatcattcagcgccctgggcccccagctggacatgctgtggagcggaagccgggggtgtgagactcatgccttcactgctcacccagagggcaaacaccactccctgtccttttcatga

SEQ ID NO: 486 - DNA, 3936 bp, Artificial Sequence
  Synthetic Polynucleotide
atggccttaccagtgaccgccttgctcctgccgctggccttgctgctccacgccgccaggccggacatccagatgacacagactacatcctccctgtctgcctctctgggagacagagtcaccatcagttgcagggcaagtcaggacattagtaaatatttaaattggtatcagcagaaaccagatggaactgttaaactcctgatctaccatacatcaagattacactcaggagtcccatcaaggttcagtggcagtgggtctggaacagattattctctcaccattagcaacctggagcaagaagatattgccacttacttttgccaacagggtaatacgcttccgtacacgttcggaggggggaccaagctggagatcacaggtggcggtggctcgggcggtggtgggtcgggtggcggcggatctgaggtgaaactgcaggagtcaggacctggcctggtggcgccctcacagagcctgtccgtcacatgcactgtctcaggggtctcattacccgactatggtgtaagctggattcgccagcctccacgaaagggtctggagtggctgggagtaatatggggtagtgaaaccacatactataattcagctctcaaatccagactgaccatcatcaaggacaactccaagagccaagttttcttaaaaatgaacagtctgcaaactgatgacacagccatttactactgtgccaaacattattactacggtggtagctatgctatggactactggggtcaaggaacctcagtcaccgtctcctcacgcgtagagcagaaactgatctcggaagaggatctggcgaagcccaccacgacgccagcgccgcgaccaccaacaccggcgcccaccatcgcgtcgcagcccctgtccctgcgcccagaggcgtgccggccagcggcggggggcgcagtgcacacgagggggctggacttcgcctgtgacatctacatctgggcgcccttggccgggacttgtggggtccttctcctgtcactggttatcaccctttactgcaaacggggcagaaagaaactcctgtatatattcaaacaaccatttatgagaccagtacaaactactcaagaggaagatggctgtagctgccgatttccagaagaagaagaaggaggatgtgaactgagagtgaagttcagcaggagcgcagacgcccccgcgtaccagcagggccagaaccagctctataacgagctgaatctaggacgaagagaggagtacgatgttttggacaagagacgtggccgggaccctgagatggggggaaagccgagaaggaagaaccctcaggaaggcctgtacaatgaactgcagaaagataagatggcggaggcctacagtgagattgggatgaaaggcgagcgccggaggggcaaggggcacgatggcctttaccagggtctcagtacagccaccaaggacacctacgacgcccttcacatgcaggccctgccccctcgctctagtggctccggcgagggcagaggaagtctactaacctgcggagatgtggaagaaaatcctggcccacatatggctatgtggatacaggctcagcagctccagggcgatgcccttcaccagatgcaggccttgtacggccagcatttccccatcgaggtgcgacattatttatcacagtggatcgaaagccaagcctgggactcaatagatcttgataatccacaggagaacattaaggccacccagctcctggagggcctggtgcaggagctgcagaagaaggcggagcaccaggtgggggaagatgggtttttgctgaagatcaagctggggcactatgccacacagctccagagcacgtacgaccgctgccccatggagctggttcgctgtatccggcacattctgtacaacgaacagaggctggttcgcgaagccaacaacggcagctctccagctggaagtcttgctgacgccatgtcccagaagcaccttcagatcaaccaaacgtttgaggagctgcgcctgatcacacaggacacggagaacgagctgaagaagctgcagcagacccaagagtacttcatcatccagtaccaggagagcctgcggatccaagctcagtttgcccagctgggacagctgaacccccaggagcgcatgagcagggagacggccctccagcagaagcaagtgtccctggagacctggctgcagcgagaggcacagacactgcagcagtaccgagtggagctggctgagaagcaccagaagaccctgcagctgctgcggaagcagcagaccatcatcctggacgacgagctgatccagtggaagcggagacagcagctggccgggaacgggggtccccccgagggcagcctggacgtgctgcagtcctggtgtgagaagctggccgagatcatctggcagaaccggcagcagatccgcagggctgagcacttgtgccagcagctgcccatcccaggccccgtggaggagatgctggctgaggtcaacgccaccatcacggacatcatctcagccctggtcaccagcacgttcatcatcgagaagcagcctcctcaggtcctgaagacccagaccaagtttgcagccaccgtgcgcctgctggtgggggggaagctgaatgtgcacatgaaccccccgcaggtgaaggcgaccatcatcagcgagcagcaggccaagtccctgctcaagaatgagaacacccgcaatgattacagcggcgagatcctgaacaactgttgcgtcatggagtaccaccaggccactggcacactcagcgcccacttcagaaacatgtccctgaaacgaatcaagaggtctgaccgccgtggggcagagtcagtaacggaagagaagttcacgatcctgtttgactcacagttcagcgtcggtggaaacgagctggtctttcaagtcaagaccttgtcgctcccggtggtggtgattgttcacggcagccaggacaacaatgccacagccactgtcctctgggacaacgcctttgcagagcctggcagggtgccatttgccgtgcctgacaaggtgctgtggccgcagctgtgtgaagcgctcaacatgaaattcaaggctgaagtacagagcaaccggggcttgaccaaggagaacctcgtgttcctggcacagaaactgttcaacatcagcagcaaccacctcgaggactacaacagcatgtccgtgtcctggtcccagttcaaccgggagaatttgccaggacggaattacactttctggcagtggtttgatggcgtgatggaagtattgaaaaaacatctcaagcctcactggaatgatggggctatcctgggtttcgtgaacaagcaacaggcccacgacctgctcatcaacaagccagacgggaccttcctgctgcgcttcagcgactcggaaatcgggggcatcagcattgcttggaagtttgactctcaggagagaatgttttggaatctgatgccttttaccactagagacttctctatccggtccctcgctgaccgcctgggggacctgaattacctcatatatgtgtttcctgatcggccaaaggatgaagtatattctaagtactacacaccggtcccctgtgagcccgcaactgcgaaagcagctgacggatacgtgaagccacagatcaagcaggtggtccccgagtttgcaaatgcatccacagatgctgggagtggcgccacctacatggatcaggctccttccccagtcgtgtgccctcaggctcactacaacatgtacccacccaacccggactccgtccttgataccgatggggacttcgatctggaagacacgatggacgtggcgcggcgcgtggaagagctcttaggccggcccatggacagtcagtggatccctcacgcacagtcatga

SEQ ID NO: 487 - DNA, 5040 bp, Artificial Sequence
  Synthetic Polynucleotide
atggccttaccagtgaccgccttgctcctgccgctggccttgctgctccacgccgccaggccggacatccagatgacacagactacatcctccctgtctgcctctctgggagacagagtcaccatcagttgcagggcaagtcaggacattagtaaatatttaaattggtatcagcagaaaccagatggaactgttaaactcctgatctaccatacatcaagattacactcaggagtcccatcaaggttcagtggcagtgggtctggaacagattattctctcaccattagcaacctggagcaagaagatattgccacttacttttgccaacagggtaatacgcttccgtacacgttcggaggggggaccaagctggagatcacaggtggcggtggctcgggcggtggtgggtcgggtggcggcggatctgaggtgaaactgcaggagtcaggacctggcctggtggcgccctcacagagcctgtccgtcacatgcactgtctcaggggtctcattacccgactatggtgtaagctggattcgccagcctccacgaaagggtctggagtggctgggagtaatatggggtagtgaaaccacatactataattcagctctcaaatccagactgaccatcatcaaggacaactccaagagccaagttttcttaaaaatgaacagtctgcaaactgatgacacagccatttactactgtgccaaacattattactacggtggtagctatgctatggactactggggtcaaggaacctcagtcaccgtctcctcacgcgtagagcagaaactgatctcggaagaggatctggcgaagcccaccacgacgccagcgccgcgaccaccaacaccggcgcccaccatcgcgtcgcagcccctgtccctgcgcccagaggcgtgccggccagcggcggggggcgcagtgcacacgagggggctggacttcgcctgtgacatctacatctgggcgcccttggccgggacttgtggggtccttctcctgtcactggttatcaccctttactgcaaacggggcagaaagaaactcctgtatatattcaaacaaccatttatgagaccagtacaaactactcaagaggaagatggctgtagctgccgatttccagaagaagaagaaggaggatgtgaactgagagtgaagttcagcaggagcgcagacgcccccgcgtaccagcagggccagaaccagctctataacgagctgaatctaggacgaagagaggagtacgatgttttggacaagagacgtggccgggaccctgagatggggggaaagccgagaaggaagaaccctcaggaaggcctgtacaatgaactgcagaaagataagatggcggaggcctacagtgagattgggatgaaaggcgagcgccggaggggcaaggggcacgatggcctttaccagggtctcagtacagccaccaaggacacctacgacgcccttcacatgcaggccctgccccctcgctctagtggctccggcgagggcagaggaagtctactaacctgcggagatgtggaagaaaatcctggcccacatatgcagtatctaaatataaaagaggactgcaatgccatggctttctgtgctaaaatgaggagctccaagaagactgaggtgaacctggaggcccctgagccaggggtggaagtgatcttctatctgtcggacagggagcccctccggctgggcagtggagagtacacagcagaggaactgtgcatcagggctgcacaggcatgccgtatctctcctctttgtcacaacctctttgccctgtatgacgagaacaccaagctctggtatgctccaaatcgcaccatcaccgttgatgacaagatgtccctccggctccactaccggatgaggttctatttcaccaattggcatggaaccaacgacaatgagcagtcagtgtggcgtcattctccaaagaagcagaaaaatggctacgagaaaaaaaagattccagatgcaacccctctccttgatgccagctcactggagtatctgtttgctcagggacagtatgatttggtgaaatgcctggctcctattcgagaccccaagaccgagcaggatggacatgatattgagaacgagtgtctagggatggctgtcctggccatctcacactatgccatgatgaagaagatgcagttgccagaactgcccaaggacatcagctacaagcgatatattccagaaacattgaataagtccatcagacagaggaaccttctcaccaggatgcggataaataatgttttcaaggatttcctaaaggaatttaacaacaagaccatttgtgacagcagcgtgtccacgcatgacctgaaggtgaaatacttggctaccttggaaactttgacaaaacattacggtgctgaaatatttgagacttccatgttactgatttcatcagaaaatgagatgaattggtttcattcgaatgacggtggaaacgttctctactacgaagtgatggtgactgggaatcttggaatccagtggaggcataaaccaaatgttgtttctgttgaaaaggaaaaaaataaactgaagcggaaaaaactggaaaataaacacaagaaggatgaggagaaaaacaagatccgggaagagtggaacaatttttcttacttccctgaaatcactcacattgtaataaaggagtctgtggtcagcattaacaagcaggacaacaagaaaatggaactgaagctctcttcccacgaggaggccttgtcctttgtgtccctggtagatggctacttccggctcacagcagatgcccatcattacctctgcaccgacgtggcccccccgttgatcgtccacaacatacagaatggctgtcatggtccaatctgtacagaatacgccatcaataaattgcggcaagaaggaagcgaggaggggatgtacgtgctgaggtggagctgcaccgactttgacaacatcctcatgaccgtcacctgctttgagaagtctgagcaggtgcagggtgcccagaagcagttcaagaactttcagatcgaggtgcagaagggccgctacagtctgcacggttcggaccgcagcttccccagcttgggagacctcatgagccacctcaagaagcagatcctgcgcacggataacatcagcttcatgctaaaacgctgctgccagcccaagccccgagaaatctccaacctgctggtggctactaagaaagcccaggagtggcagcccgtctaccccatgagccagctgagtttcgatcggatcctcaagaaggatctggtgcagggcgagcaccttgggagaggcacgagaacacacatctattctgggaccctgatggattacaaggatgacgaaggaacttctgaagagaagaagataaaagtgatcctcaaagtcttagaccccagccacagggatatttccctggccttcttcgaggcagccagcatgatgagacaggtctcccacaaacacatcgtgtacctctatggcgtctgtttccgcgacgtggagaatatcatggtggaagagtttgtggaagggggtcctctggatctcttcatgcaccggaaaagcgatgtccttaccacaccatggaaattcaaagttgccaaacagctggccagtgccctgagctacttggaggataaagacctggtccatggaaatgtgtgtactaaaaacctcctcctggcccgtgagggcatcgacagtgagtgtggcccattcatcaagctcagtgaccccggcatccccattacggtgctgtctaggcaagaatgcattgaacgaatcccatggattgctcctgagtgtgttgaggactccaagaacctgagtgtggctgctgacaagtggagctttggaaccacgctctgggaaatctgctacaatggcgagatccccttgaaagacaagacgctgattgagaaagagagattctatgaaagccggtgcaggccagtgacaccatcatgtaaggagctggctgacctcatgacccgctgcatgaactatgaccccaatcagaggcctttcttccgagccatcatgagagacattaataagcttgaagagcagaatccagatattgtttcagaaaaaaaaccagcaactgaagtggaccccacacattttgaaaagcgcttcctaaagaggatccgtgacttgggagagggccactttgggaaggttgagctctgcaggtatgaccccgaaggggacaatacaggggagcaggtggctgttaaatctctgaagcctgagagtggaggtaaccacatagctgatctgaaaaaggaaatcgagatcttaaggaacctctatcatgagaacattgtgaagtacaaaggaatctgcacagaagacggaggaaatggtattaagctcatcatggaatttctgccttcgggaagccttaaggaatatcttccaaagaataagaacaaaataaacctcaaacagcagctaaaatatgccgttcagatttgtaaggggatggactatttgggttctcggcaatacgttcaccgggacttggcagcaagaaatgtccttgttgagagtgaacaccaagtgaaaattggagacttcggtttaaccaaagcaattgaaaccgataaggagtattacaccgtcaaggatgaccgggacagccctgtgttttggtatgctccagaatgtttaatgcaatctaaattttatattgcctctgacgtctggtcttttggagtcactctgcatgagctgctgacttactgtgattcagattctagtcccatggctttgttcctgaaaatgataggcccaacccatggccagatgacagtcacaagacttgtgaatacgttaaaagaaggaaaacgcctgccgtgcccacctaactgtccagatgaggtttatcaacttatgaggaaatgctgggaattccaaccatccaatcggacaagctttcagaaccttattgaaggatttgaagcacttttaaaatga

SEQ ID NO: 488 - DNA, 5040 bp, Artificial Sequence
  Synthetic Polynucleotide
atggccttaccagtgaccgccttgctcctgccgctggccttgctgctccacgccgccaggccggacatccagatgacacagactacatcctccctgtctgcctctctgggagacagagtcaccatcagttgcagggcaagtcaggacattagtaaatatttaaattggtatcagcagaaaccagatggaactgttaaactcctgatctaccatacatcaagattacactcaggagtcccatcaaggttcagtggcagtgggtctggaacagattattctctcaccattagcaacctggagcaagaagatattgccacttacttttgccaacagggtaatacgcttccgtacacgttcggaggggggaccaagctggagatcacaggtggcggtggctcgggcggtggtgggtcgggtggcggcggatctgaggtgaaactgcaggagtcaggacctggcctggtggcgccctcacagagcctgtccgtcacatgcactgtctcaggggtctcattacccgactatggtgtaagctggattcgccagcctccacgaaagggtctggagtggctgggagtaatatggggtagtgaaaccacatactataattcagctctcaaatccagactgaccatcatcaaggacaactccaagagccaagttttcttaaaaatgaacagtctgcaaactgatgacacagccatttactactgtgccaaacattattactacggtggtagctatgctatggactactggggtcaaggaacctcagtcaccgtctcctcacgcgtagagcagaaactgatctcggaagaggatctggcgaagcccaccacgacgccagcgccgcgaccaccaacaccggcgcccaccatcgcgtcgcagcccctgtccctgcgcccagaggcgtgccggccagcggcggggggcgcagtgcacacgagggggctggacttcgcctgtgacatctacatctgggcgcccttggccgggacttgtggggtccttctcctgtcactggttatcaccctttactgcaaacggggcagaaagaaactcctgtatatattcaaacaaccatttatgagaccagtacaaactactcaagaggaagatggctgtagctgccgatttccagaagaagaagaaggaggatgtgaactgagagtgaagttcagcaggagcgcagacgcccccgcgtaccagcagggccagaaccagctctataacgagctgaatctaggacgaagagaggagtacgatgttttggacaagagacgtggccgggaccctgagatggggggaaagccgagaaggaagaaccctcaggaaggcctgtacaatgaactgcagaaagataagatggcggaggcctacagtgagattgggatgaaaggcgagcgccggaggggcaaggggcacgatggcctttaccagggtctcagtacagccaccaaggacacctacgacgcccttcacatgcaggccctgccccctcgctctagtggctccggcgagggcagaggaagtctactaacctgcggagatgtggaagaaaatcctggcccacatatgccaggaggagggccagagatggatgactacatggagacgctgaaggatgaagaggacgccttgtgggagaatgtggagtgtaaccggcacatgctcagccgctatatcaaccctgccaagctcacgccctacctgcgtcagtgtaaggtcattgatgagcaggatgaagatgaagtgcttaatgcccctatgctgccatccaagatcaaccgagcaggccggctgttggacattctacataccaaggggcaaaggggctatgtggtcttcttggagagcctagaattttattacccagaactgtacaaactggtgactgggaaagagcccactcggagattctccaccattgtggtggaggaaggccacgagggcctcacgcacttcctgatgaacgaggtcatcaagctgcagcagcagatgaaggccaaggacctgcaacgctgcgagctgctggccaggttgcggcagctggaggatgagaagaagcagatgacgctgacgcgcgtggagctgctaaccttccaggagcggtactacaagatgaaggaagagcgggacagctacaatgacgagctggtcaaggtgaaggacgacaactacaacttagccatgcgctacgcacagctcagtgaggagaagaacatggcggtcatgaggagccgagacctccaactcgagatcgatcagctaaagcaccggttgaataagatggaggaggaatgtaagctggagagaaatcagtctctaaaactgaagaatgacattgaaaatcggcccaagaaggagcaggttctggaactggagcgggagaatgaaatgctgaagaccaaaaaccaggagctgcagtccatcatccaggccgggaagcgcagcctgccagactcagacaaggccatcctggacatcttggaacacgaccgcaaggaggccctggaggacaggcaggagctggtcaacaggatctacaacctgcaggaggaggcccgccaggcagaggagctgcgagacaagtacctggaggagaaggaggacctggagctcaagtgctcgaccctgggaaaggactgtgaaatgtacaagcaccgcatgaacacggtcatgctgcagctggaggaggtggagcgggagcgggaccaggccttccactcccgagatgaagctcagacacagtactcgcagtgcttaatcgaaaaggacaagtacaggaagcagatccgcgagctggaggagaagaacgacgagatgaggatcgagatggtgcggcgggaggcctgcatcgtcaacctggagagcaagctgcggcgcctctccaaggacagcaacaacctggaccagagtctgcccaggaacctgccagtaaccatcatctctcaggactttggggatgccagccccaggaccaatggtcaagaagctgacgattcttccacctcggaggagtcacctgaagacagcaagtacttcctgccctaccatccgccccagcgcaggatgaacctgaagggcatccagctgcagagagccaaatcccccatcagcctgaagcgaacatcagattttcaagccaaggggcacgaggaagaaggcacggacgccagccctagctcctgcggatctctgcccatcaccaactccttcaccaagatgcagcccccccggagccgcagcagcatcatgtcaatcaccgccgagcccccgggaaacgactccatcgtcagacgctacaaggaggacgcgccccatcgcagcacagtcgaagaagacaatgacagcggcgggtttgacgccttagatctggatgatgacagtcacgaacgctactccttcggaccctccttcatccactcctcctcctcctcccaccaatccgagggcctggatgcctacgacctggagcaggtcaacctcatgttcaggaagttctctctggaaagacccttccggccttcggtcacctctgtggggcacgtgcggggcccagggccctcggtgcagcacacgacgctgaatggcgacagcctcacctcccagctcaccctgctggggggcaacgcgcgagggagcttcgtgcactcggtcaagcctggctctctggccgagaaagccggcctccgtgagggccaccagctgctgctgctagaaggctgcatccgaggcgagaggcagagtgtcccgttggacacatgcaccaaagaggaagcccactggaccatccagaggtgcagcggccccgtcacgctgcactacaaggtcaaccacgaagggtaccggaagctggtgaaggacatggaggacggcctgatcacatcgggggactcgttctacatccggctgaacctgaacatctccagccagctggacgcctgcaccatgtccctgaagtgtgacgatgttgtgcacgtccgtgacaccatgtaccaggacaggcacgagtggctgtgcgcgcgggtcgaccctttcacagaccatgacctggatatgggcaccatacccagctacagccgagcccagcagctcctcctggtgaaactgcagcgcctgatgcaccgaggcagccgggaggaggtagacggcacccaccacaccctgcgggcactccggaacaccctgcagccagaagaagcgctttcaacaagcgacccccgggtcagcccccgtctctcgcgagcaagcttcctttttggccagctccttcagttcgtcagcaggtccgagaacaagtataagcggatgaacagcaacgagcgggtccgcatcatctcggggagtccgctagggagcctggcccggtcctcgctggacgccaccaagctcttgactgagaagcaggaagagctggaccctgagagcgagctgggcaagaacctcagcctcatcccctacagcctggtacgcgccttctactgcgagcgccgccggcccgtgctcttcacacccaccgtgctggccaagacgctggtgcagaggctgctcaactcgggaggtgccatggagttcaccatctgcaagtcagatatcgtcacaagagatgagttcctcagaaggcagaagacggagaccatcatctactcccgagagaagaaccccaacgcgttcgaatgcatcgcccctgccaacattgaagctgtggccgccaagaacaagcactgcctgctggaggctgggatcggctgcacaagagacttgatcaagtccaacatctaccccatcgtgctcttcatccgggtgtgtgagaagaacatcaagaggttcagaaagctgctgccccgacctgagacggaggaggagttcctgcgcgtgtgccggctgaaggagaaggagctggaggccctgccgtgcctgtacgccacggtggaacctgacatgtggggcagcgtagaggagctgctccgcgttgtcaaggacaagatcggcgaggagcagcgcaagaccatctgggtggacgaggaccagctgtga

SEQ ID NO: 489 - DNA, 3885 bp, Artificial Sequence
  Synthetic Polynucleotide
atggccttaccagtgaccgccttgctcctgccgctggccttgctgctccacgccgccaggccggacatccagatgacacagactacatcctccctgtctgcctctctgggagacagagtcaccatcagttgcagggcaagtcaggacattagtaaatatttaaattggtatcagcagaaaccagatggaactgttaaactcctgatctaccatacatcaagattacactcaggagtcccatcaaggttcagtggcagtgggtctggaacagattattctctcaccattagcaacctggagcaagaagatattgccacttacttttgccaacagggtaatacgcttccgtacacgttcggaggggggaccaagctggagatcacaggtggcggtggctcgggcggtggtgggtcgggtggcggcggatctgaggtgaaactgcaggagtcaggacctggcctggtggcgccctcacagagcctgtccgtcacatgcactgtctcaggggtctcattacccgactatggtgtaagctggattcgccagcctccacgaaagggtctggagtggctgggagtaatatggggtagtgaaaccacatactataattcagctctcaaatccagactgaccatcatcaaggacaactccaagagccaagttttcttaaaaatgaacagtctgcaaactgatgacacagccatttactactgtgccaaacattattactacggtggtagctatgctatggactactggggtcaaggaacctcagtcaccgtctcctcacgcgtagagcagaaactgatctcggaagaggatctggcgaagcccaccacgacgccagcgccgcgaccaccaacaccggcgcccaccatcgcgtcgcagcccctgtccctgcgcccagaggcgtgccggccagcggcggggggcgcagtgcacacgagggggctggacttcgcctgtgacatctacatctgggcgcccttggccgggacttgtggggtccttctcctgtcactggttatcaccctttactgcaaacggggcagaaagaaactcctgtatatattcaaacaaccatttatgagaccagtacaaactactcaagaggaagatggctgtagctgccgatttccagaagaagaagaaggaggatgtgaactgagagtgaagttcagcaggagcgcagacgcccccgcgtaccagcagggccagaaccagctctataacgagctgaatctaggacgaagagaggagtacgatgttttggacaagagacgtggccgggaccctgagatggggggaaagccgagaaggaagaaccctcaggaaggcctgtacaatgaactgcagaaagataagatggcggaggcctacagtgagattgggatgaaaggcgagcgccggaggggcaaggggcacgatggcctttaccagggtctcagtacagccaccaaggacacctacgacgcccttcacatgcaggccctgccccctcgctctagtggctccggcgagggcagaggaagtctactaacctgcggagatgtggaagaaaatcctggcccacatatggcccaatggaatcagctacagcagcttgacacacggtacctggagcagctccatcagctctacagtgacagcttcccaatggagctgcggcagtttctggccccttggattgagagtcaagattgggcatatgcggccagcaaagaatcacatgccactttggtgtttcataatctcctgggagagattgaccagcagtatagccgcttcctgcaagagtcgaatgttctctatcagcacaatctacgaagaatcaagcagtttcttcagagcaggtatcttgagaagccaatggagattgcccggattgtggcccggtgcctgtgggaagaatcacgccttctacagactgcagccactgcggcccagcaagggggccaggccaaccaccccacagcagccgtggtgacggagaagcagcagatgctggagcagcaccttcaggatgtccggaagagagtgcaggatctagaacagaaaatgaaagtggtagagaatctccaggatgactttgatttcaactataaaaccctcaagagtcaaggagacatgcaagatctgaatggaaacaaccagtcagtgaccaggcagaagatgcagcagctggaacagatgctcactgcgctggaccagatgcggagaagcatcgtgagtgagctggcggggcttttgtcagcgatggagtacgtgcagaaaactctcacggacgaggagctggctgactggaagaggcggcaacagattgcctgcattggaggcccgcccaacatctgcctagatcggctagaaaactggataacgtcattagcagaatctcaacttcagacccgtcaacaaattaagaaactggaggagttgcagcaaaaagtttcctacaaaggggaccccattgtacagcaccggccgatgctggaggagagaatcgtggagctgtttagaaacttaatgaaaagtgcctttgtggtggagcggcagccctgcatgcccatgcatcctgaccggcccctcgtcatcaagaccggcgtccagttcactactaaagtcaggttgctggtcaaattccctgagttgaattatcagcttaaaattaaagtgtgcattgacaaagactctggggacgttgcagctctcagaggatcccggaaatttaacattctgggcacaaacacaaaagtgatgaacatggaagaatccaacaacggcagcctctctgcagaattcaaacacttgaccctgagggagcagagatgtgggaatgggggccgagccaattgtgatgcttccctgattgtgactgaggagctgcacctgatcacctttgagaccgaggtgtatcaccaaggcctcaagattgacctagagacccactccttgccagttgtggtgatctccaacatctgtcagatgccaaatgcctgggcgtccatcctgtggtacaacatgctgaccaacaatcccaagaatgtaaacttttttaccaagcccccaattggaacctgggatcaagtggccgaggtcctgagctggcagttctcctccaccaccaagcgaggactgagcatcgagcagctgactacactggcagagaaactcttgggacctggtgtgaattattcagggtgtcagatcacatgggctaaattttgcaaagaaaacatggctggcaagggcttctccttctgggtctggctggacaatatcattgaccttgtgaaaaagtacatcctggccctttggaacgaagggtacatcatgggctttatcagtaaggagcgggagcgggccatcttgagcactaagcctccaggcaccttcctgctaagattcagtgaaagcagcaaagaaggaggcgtcactttcacttgggtggagaaggacatcagcggtaagacccagatccagtccgtggaaccattcacaaagcagcagctgaacaacatgtcatttgctgaaatcatcatgggctataagatcatggatgctaccaatatcctggtgtctccactggtctatctctatcctgacattcccaaggaggaggcattcggaaagtattgtcggccagagagccaggagcatcctgaagctgacccaggcgctgccccatacctgaagaccaagtttatctgtgtgacaccaacgacctgcagcaataccattgacctgccgatgtccccccgcactttagattcattgatgcagtttggaaataatggtgaaggtgctgaaccctcagcaggagggcagtttgagtccctcacctttgacatggagttgacctcggagtgcgctacctcccccatgtga

SEQ ID NO: 490 - DNA, 3876 bp, Artificial Sequence
  Synthetic Polynucleotide
atggccttaccagtgaccgccttgctcctgccgctggccttgctgctccacgccgccaggccggacatccagatgacacagactacatcctccctgtctgcctctctgggagacagagtcaccatcagttgcagggcaagtcaggacattagtaaatatttaaattggtatcagcagaaaccagatggaactgttaaactcctgatctaccatacatcaagattacactcaggagtcccatcaaggttcagtggcagtgggtctggaacagattattctctcaccattagcaacctggagcaagaagatattgccacttacttttgccaacagggtaatacgcttccgtacacgttcggaggggggaccaagctggagatcacaggtggcggtggctcgggcggtggtgggtcgggtggcggcggatctgaggtgaaactgcaggagtcaggacctggcctggtggcgccctcacagagcctgtccgtcacatgcactgtctcaggggtctcattacccgactatggtgtaagctggattcgccagcctccacgaaagggtctggagtggctgggagtaatatggggtagtgaaaccacatactataattcagctctcaaatccagactgaccatcatcaaggacaactccaagagccaagttttcttaaaaatgaacagtctgcaaactgatgacacagccatttactactgtgccaaacattattactacggtggtagctatgctatggactactggggtcaaggaacctcagtcaccgtctcctcacgcgtagagcagaaactgatctcggaagaggatctggcgaagcccaccacgacgccagcgccgcgaccaccaacaccggcgcccaccatcgcgtcgcagcccctgtccctgcgcccagaggcgtgccggccagcggcggggggcgcagtgcacacgagggggctggacttcgcctgtgacatctacatctgggcgcccttggccgggacttgtggggtccttctcctgtcactggttatcaccctttactgcaaacggggcagaaagaaactcctgtatatattcaaacaaccatttatgagaccagtacaaactactcaagaggaagatggctgtagctgccgatttccagaagaagaagaaggaggatgtgaactgagagtgaagttcagcaggagcgcagacgcccccgcgtaccagcagggccagaaccagctctataacgagctgaatctaggacgaagagaggagtacgatgttttggacaagagacgtggccgggaccctgagatggggggaaagccgagaaggaagaaccctcaggaaggcctgtacaatgaactgcagaaagataagatggcggaggcctacagtgagattgggatgaaaggcgagcgccggaggggcaaggggcacgatggcctttaccagggtctcagtacagccaccaaggacacctacgacgcccttcacatgcaggccctgccccctcgctctagtggctccggcgagggcagaggaagtctactaacctgcggagatgtggaagaaaatcctggcccacatatggcggcgctgagcggtggcggtggtggcggcgcggagccgggccaggctctgttcaacggggacatggagcccgaggccggcgccggcgccggcgccgcggcctcttcggctgcggaccctgccattccggaggaggtgtggaatatcaaacaaatgattaagttgacacaggaacatatagaggccctattggacaaatttggtggggagcataatccaccatcaatatatctggaggcctatgaagaatacaccagcaagctagatgcactccaacaaagagaacaacagttattggaatctctggggaacggaactgatttttctgtttctagctctgcatcaatggataccgttacatcttcttcctcttctagcctttcagtgctaccttcatctctttcagtttttcaaaatcccacagatgtggcacggagcaaccccaagtcaccacaaaaacctatcgttagagtcttcctgcccaacaaacagaggacagtggtacctgcaaggtgtggagttacagtccgagacagtctaaagaaagcactgatgatgagaggtctaatcccagagtgctgtgctgtttacagaattcaggatggagagaagaaaccaattggttgggacactgatatttcctggcttactggagaagaattgcatgtggaagtgttggagaatgttccacttacaacacacaactttgtacgaaaaacgtttttcaccttagcattttgtgacttttgtcgaaagctgcttttccagggtttccgctgtcaaacatgtggttataaatttcaccagcgttgtagtacagaagttccactgatgtgtgttaattatgaccaacttgatttgctgtttgtctccaagttctttgaacaccacccaataccacaggaagaggcgtccttagcagagactgccctaacatctggatcatccccttccgcacccgcctcggactctattgggccccaaattctcaccagtccgtctccttcaaaatccattccaattccacagcccttccgaccagcagatgaagatcatcgaaatcaatttgggcaacgagaccgatcctcatcagctcccaatgtgcatataaacacaatagaacctgtcaatattgatgacttgattagagaccaaggatttcgtggtgatggaggatcaaccacaggtttgtctgctaccccccctgcctcattacctggctcactaactaacgtgaaagccttacagaaatctccaggacctcagcgagaaaggaagtcatcttcatcctcagaagacaggaatcgaatgaaaacacttggtagacgggactcgagtgatgattgggagattcctgatgggcagattacagtgggacaaagaattggatctggatcatttggaacagtctacaagggaaagtggcatggtgatgtggcagtgaaaatgttgaatgtgacagcacctacacctcagcagttacaagccttcaaaaatgaagtaggagtactcaggaaaacacgacatgtgaatatcctactcttcatgggctattccacaaagccacaactggctattgttacccagtggtgtgagggctccagcttgtatcaccatctccatatcattgagaccaaatttgagatgatcaaacttatagatattgcacgacagactgcacagggcatggattacttacacgccaagtcaatcatccacagagacctcaagagtaataatatatttcttcatgaagacctcacagtaaaaataggtgattttggtctagctacagagaaatctcgatggagtgggtcccatcagtttgaacagttgtctggatccattttgtggatggcaccagaagtcatcagaatgcaagataaaaatccatacagctttcagtcagatgtatatgcatttggaattgttctgtatgaattgatgactggacagttaccttattcaaacatcaacaacagggaccagataatttttatggtgggacgaggatacctgtctccagatctcagtaaggtacggagtaactgtccaaaagccatgaagagattaatggcagagtgcctcaaaaagaaaagagatgagagaccactctttccccaaattctcgcctctattgagctgctggcccgctcattgccaaaaattcaccgcagtgcatcagaaccctccttgaatcgggctggtttccaaacagaggattttagtctatatgcttgtgcttctccaaaaacacccatccaggcagggggatatggtgcgtttcctgtccactga

SEQ ID NO: 491 - DNA, 5424 bp, Artificial Sequence
  Synthetic Polynucleotide
atggccttaccagtgaccgccttgctcctgccgctggccttgctgctccacgccgccaggccggacatccagatgacacagactacatcctccctgtctgcctctctgggagacagagtcaccatcagttgcagggcaagtcaggacattagtaagtacctgaactggtatcagcagaaaccagatggaactgttaaactcctgatctaccatacatcaagattacactcaggagtcccatcaaggttcagtggcagtgggtctggaacagattattctctcaccattagcaacctggagcaagaagatattgccacttacttttgccaacagggtaatacgcttccgtacacgttcggaggggggaccaagctggagatcacactcgaggggaaaccaattcccaaccctcttctgggactggattcaaccggcagcggcgaggacctgaagaacgtgttcccacctgaggtggccgtgttcgagcctagcaaggccgagatcgcccacacccagaaagccaccctcgtgtgcctggctaccggcttctaccccgaccatgtggaactgtcttggtgggtcaacggcaaagaggtgcacagcggcgtgtgtaccgacccccagccactgaaagaacagcccgccctgaacgacagccggtactgcctgagcagcagactgagagtgtccgccaccttctggcagaacccccggaaccacttcagatgccaggtgcagttctacggcctgagcgagaacgacgagtggacccaggacagagccaagcccgtgacccagatcgtgtctgccgaagcctggggcagagccgattgcggcatcaccagcgccagctaccaccagggcgtgctgagcgccaccatcctgtacgagatcctgctgggcaaggccaccctgtacgccgtgctggtgtctgccctggtgctgatggctatggtcaagcggaaggacagccggggaagggccaagcgatctggatctggagcaacaaacttctcactactcaaacaagcaggtgacgtggaggagaatcccgggcctactagtatggactggatttggcgcatccttttccttgtcggcgctgctaccggcgcgcattccttcgaagtgaaactgcaggagtcaggacctggcctggtggcgccctcacagagcctgtccgtcacatgcactgtctcaggggtctcattacccgactatggtgtaagctggattcgccagcctccacgaaagggtctggagtggctgggagtaatatggggtagtgaaaccacatactataattcagctctcaaatccagactgaccatcatcaaggacaactccaagagccaagttttcttaaaaatgaacagtctgcaaactgatgacacagccatttactactgtgccaaacattattactacggtggtagctatgctatggactactggggccaaggaacctcagtcaccgtctcctcaacgcgtgagcagaaactgatctcggaagaggatgggagcggcatccagaaccctgatcctgccgtgtaccagctgcgggatagcaagagcagcgacaagagcgtgtgtctgttcaccgacttcgacagccagaccaacgtgtcccagagcaaggactccgacgtgtacatcaccgataagtgcgtgctggacatgcggagcatggacttcaagagcaactccgccgtggcctggtccaacaagtccgatttcgcctgcgccaacgccttcaacaacagcattatccccgaggacacattcttcccaagcagcgacgtgccctgcgacgtgaagctggtggaaaagagcttcgagacagacaccaacctgaacttccagaacctgagcgtgatcggcttcagaatcctgctgctgaaagtggccggctttaacctgctgatgaccctgcggctgtggtccagccgcgccaagagaagcggatctggcgtgaagcagaccctgaatttcgacctgctgaagctggctggcgacgtggaatccaacccaggcccttctagaggccatatggcacctccaagtgaagagacgcccctgatccctcagcgttcatgcagcctcttgtccacggaggctggtgccctgcatgtgctgctgcccgctcggggccccgggcccccccagcgcctatctttctcctttggggaccacttggctgaggacctgtgcgtgcaggctgccaaggccagcggcatcctgcctgtgtaccactccctctttgctctggccacggaggacctgtcctgctggttccccccgagccacatcttctccgtggaggatgccagcacccaagtcctgctgtacaggattcgcttttacttccccaattggtttgggctggagaagtgccaccgcttcgggctacgcaaggatttggccagtgctatccttgacctgccagtcctggagcacctctttgcccagcaccgcagtgacctggtgagtgggcgcctccccgtgggcctcagtctcaaggagcagggtgagtgtctcagcctggccgtgttggacctggcccggatggcgcgagagcaggcccagcggccgggagagctgctgaagactgtcagctacaaggcctgcctacccccaagcctgcgcgacctgatccagggcctgagcttcgtgacgcggaggcgtattcggaggacggtgcgcagagccctgcgccgcgtggccgcctgccaggcagaccggcactcgctcatggccaagtacatcatggacctggagcggctggatccagccggggccgccgagaccttccacgtgggcctccctggggcccttggtggccacgacgggctggggctgctccgcgtggctggtgacggcggcatcgcctggacccagggagaacaggaggtcctccagcccttctgcgactttccagaaatcgtagacattagcatcaagcaggccccgcgcgttggcccggccggagagcaccgcctggtcactgttaccaggacagacaaccagattttagaggccgagttcccagggctgcccgaggctctgtcgttcgtggcgctcgtggacggctacttccggctgaccacggactcccagcacttcttctgcaaggaggtggcaccgccgaggctgctggaggaagtggccgagcagtgccacggccccatcactctggactttgccatcaacaagctcaagactgggggctcacgtcctggctcctatgttctccgccgcagcccccaggactttgacagcttcctcctcactgtctgtgtccagaacccccttggtcctgattataagggctgcctcatccggcgcagccccacaggaaccttccttctggttggcctcagccgaccccacagcagtcttcgagagctcctggcaacctgctgggatggggggctgcacgtagatggggtggcagtgaccctcacttcctgctgtatccccagacccaaagaaaagtccaacctgatcgtggtccagagaggtcacagcccacccacatcatccttggttcagccccaatcccaataccagctgagtcagatcacatttcacaagatccctgctgacagcctggagtggcatgagaacctgggccatgggtccttcaccaagatttaccggggctgtcgccatgaggtggtggatggggaggcccgaaagacagaggtgctgctgaaggtcatggatgccaagcacaagaactgcatggagtcattcctggaagcagcgagcttgatgagccaagtgtcgtaccggcatctcgtgctgctccacggcgtgtgcatggctggagacagcaccatggtgcaggaatttgtacacctgggggccatagacatgtatctgcgaaaacgtggccacctggtgccagccagctggaagctgcaggtggtcaaacagctggcctacgccctcaactatctggaggacaaaggcctgccccatggcaatgtctctgcccggaaggtgctcctggctcgggagggggctgatgggagcccgcccttcatcaagctgagtgaccctggggtcagccccgctgtgttaagcctggagatgctcaccgacaggatcccctgggtggcccccgagtgtctccgggaggcgcagacacttagcttggaagctgacaagtggggcttcggcgccacggtctgggaagtgtttagtggcgtcaccatgcccatcagtgccctggatcctgctaagaaactccaattttatgaggaccggcagcagctgccggcccccaagtggacagagctggccctgctgattcaacagtgcatggcctatgagccggtccagaggccctccttccgagccgtcattcgtgacctcaatagcctcatctcttcagactatgagctcctctcagaccccacacctggtgccctggcacctcgtgatgggctgtggaatggtgcccagctctatgcctgccaagaccccacgatcttcgaggagagacacctcaagtacatctcacagctgggcaagggcaactttggcagcgtggagctgtgccgctatgacccgctaggcgacaatacaggtgccctggtggccgtgaaacagctgcagcacagcgggccagaccagcagagggactttcagcgggagattcagatcctcaaagcactgcacagtgatttcattgtcaagtatcgtggtgtcagctatggcccgggccgccagagcctgcggctggtcatggagtacctgcccagcggctgcttgcgcgacttcctgcagcggcaccgcgcgcgcctcgatgccagccgcctccttctctattcctcgcagatctgcaagggcatggagtacctgggctcccgccgctgcgtgcaccgcgacctggccgcccgaaacatcctcgtggagagcgaggcacacgtcaagatcgctgacttcggcctagctaagctgctgccgcttgacaaagactactacgtggtccgcgagccaggccagagccccattttctggtatgcccccgaatccctctcggacaacatcttctctcgccagtcagacgtctggagcttcggggtcgtcctgtacgagctcttcacctactgcgacaaaagctgcagcccctcggccgagttcctgcggatgatgggatgtgagcgggatgtccccgccctctgccgcctcttggaactgctggaggagggccagaggctgccggcgcctcctgcctgccctgctgaggttcacgagctcatgaagctgtgctgggcccctagcccacaggaccggccatcattcagcgccctgggcccccagctggacatgctgtggagcggaagccgggggtgtgagactcatgccttcactgctcacccagagggcaaacaccactccctgtccttttcatga

SEQ ID NO: 492 - DNA, 4841 bp, Artificial Sequence
  Synthetic Polynucleotide
atggccttaccagtgaccgccttgctcctgccgctggccttgctgctccacgccgccaggccggacatccagatgacacagactacatcctccctgtctgcctctctgggagacagagtcaccatcagttgcagggcaagtcaggacattagtaaatatttaaattggtatcagcagaaaccagatggaactgttaaactcctgatctaccatacatcaagattacactcaggagtcccatcaaggttcagtggcagtgggtctggaacagattattctctcaccattagcaacctggagcaagaagatattgccacttacttttgccaacagggtaatacgcttccgtacacgttcggaggggggaccaagctggagatcacaggtggcggtggctcgggcggtggtgggtcgggtggcggcggatctgaggtgaaactgcaggagtcaggacctggcctggtggcgccctcacagagcctgtccgtcacatgcactgtctcaggggtctcattacccgactatggtgtaagctggattcgccagcctccacgaaagggtctggagtggctgggagtaatatggggtagtgaaaccacatactataattcagctctcaaatccagactgaccatcatcaaggacaactccaagagccaagttttcttaaaaatgaacagtctgcaaactgatgacacagccatttactactgtgccaaacattattactacggtggtagctatgctatggactactggggtcaaggaacctcagtcaccgtctcctcacgcgtagagcagaaactgatctcggaagaggatctggcgaagcccaccacgacgccagcgccgcgaccaccaacaccggcgcccaccatcgcgtcgcagcccctgtccctgcgcccagaggcgtgccggccagcggcggggggcgcagtgcacacgagggggctggacttcgcctgtgacatctacatctgggcgcccttggccgggacttgtggggtccttctcctgtcactggttatcaccctttactgcgggcgcgccagagtgaagttcagcaggagcgcagacgcccccgcgtaccagcagggccagaaccagctctataacgagctgaatctaggacgaagagaggagtacgatgttttggacaagagacgtggccgggaccctgagatggggggaaagccgagaaggaagaaccctcaggaaggcctgtacaatgaactgcagaaagataagatggcggaggcctacagtgagattgggatgaaaggcgagcgccggaggggcaaggggcacgatggcctttaccagggtctcagtacagccaccaaggacacctacgacgcccttcacatgcaggccctgccccctcgctctagaggatctggagcaacaaacttctcactactcaaacaagcaggtgacgtggaggagaatcccgggcctgggatccacatggcacctccaagtgaagagacgcccctgatccctcagcgttcatgcagcctcttgtccacggaggctggtgccctgcatgtgctgctgcccgctcggggccccgggcccccccagcgcctatctttctcctttggggaccacttggctgaggacctgtgcgtgcaggctgccaaggccagcggcatcctgcctgtgtaccactccctctttgctctggccacggaggacctgtcctgctggttccccccgagccacatcttctccgtggaggatgccagcacccaagtcctgctgtacaggattcgcttttacttccccaattggtttgggctggagaagtgccaccgcttcgggctacgcaaggatttggccagtgctatccttgacctgccagtcctggagcacctctttgcccagcaccgcagtgacctggtgagtgggcgcctccccgtgggcctcagtctcaaggagcagggtgagtgtctcagcctggccgtgttggacctggcccggatggcgcgagagcaggcccagcggccgggagagctgctgaagactgtcagctacaaggcctgcctacccccaagcctgcgcgacctgatccagggcctgagcttcgtgacgcggaggcgtattcggaggacggtgcgcagagccctgcgccgcgtggccgcctgccaggcagaccggcactcgctcatggccaagtacatcatggacctggagcggctggatccagccggggccgccgagaccttccacgtgggcctccctggggcccttggtggccacgacgggctggggctgctccgcgtggctggtgacggcggcatcgcctggacccagggagaacaggaggtcctccagcccttctgcgactttccagaaatcgtagacattagcatcaagcaggccccgcgcgttggcccggccggagagcaccgcctggtcactgttaccaggacagacaaccagattttagaggccgagttcccagggctgcccgaggctctgtcgttcgtggcgctcgtggacggctacttccggctgaccacggactcccagcacttcttctgcaaggaggtggcaccgccgaggctgctggaggaagtggccgagcagtgccacggccccatcactctggactttgccatcaacaagctcaagactgggggctcacgtcctggctcctatgttctccgccgcagcccccaggactttgacagcttcctcctcactgtctgtgtccagaacccccttggtcctgattataagggctgcctcatccggcgcagccccacaggaaccttccttctggttggcctcagccgaccccacagcagtcttcgagagctcctggcaacctgctgggatggggggctgcacgtagatggggtggcagtgaccctcacttcctgctgtatccccagacccaaagaaaagtccaacctgatcgtggtccagagaggtcacagcccacccacatcatccttggttcagccccaatcccaataccagctgagtcagatcacatttcacaagatccctgctgacagcctggagtggcatgagaacctgggccatgggtccttcaccaagatttaccggggctgtcgccatgaggtggtggatggggaggcccgaaagacagaggtgctgctgaaggtcatggatgccaagcacaagaactgcatggagtcattcctggaagcagcgagcttgatgagccaagtgtcgtaccggcatctcgtgctgctccacggcgtgtgcatggctggagacagcaccatggtgcaggaatttgtacacctgggggccatagacatgtatctgcgaaaacgtggccacctggtgccagccagctggaagctgcaggtggtcaaacagctggcctacgccctcaactatctggaggacaaaggcctgccccatggcaatgtctctgcccggaaggtgctcctggctcgggagggggctgatgggagcccgcccttcatcaagctgagtgaccctggggtcagccccgctgtgttaagcctggagatgctcaccgacaggatcccctgggtggcccccgagtgtctccgggaggcgcagacacttagcttggaagctgacaagtggggcttcggcgccacggtctgggaagtgtttagtggcgtcaccatgcccatcagtgccctggatcctgctaagaaactccaattttatgaggaccggcagcagctgccggcccccaagtggacagagctggccctgctgattcaacagtgcatggcctatgagccggtccagaggccctccttccgagccgtcattcgtgacctcaatagcctcatctcttcagactatgagctcctctcagaccccacacctggtgccctggcacctcgtgatgggctgtggaatggtgcccagctctatgcctgccaagaccccacgatcttcgaggagagacacctcaagtacatctcacagctgggcaagggcaactttggcagcgtggagctgtgccgctatgacccgctaggcgacaatacaggtgccctggtggccgtgaaacagctgcagcacagcgggccagaccagcagagggactttcagcgggagattcagatcctcaaagcactgcacagtgatttcattgtcaagtatcgtggtgtcagctatggcccgggccgccagagcctgcggctggtcatggagtacctgcccagcggctgcttgcgcgacttcctgcagcggcaccgcgcgcgcctcgatgccagccgcctccttctctattcctcgcagatctgcaagggcatggagtacctgggctcccgccgctgcgtgcaccgcgacctggccgcccgaaacatcctcgtggagagcgaggcacacgtcaagatcgctgacttcggcctagctaagctgctgccgcttgacaaagactactacgtggtccgcgagccaggccagagccccattttctggtatgcccccgaatccctctcggacaacatcttctctcgccagtcagacgtctggagcttcggggtcgtcctgtacgagctcttcacctactgcgacaaaagctgcagcccctcggccgagttcctgcggatgatgggatgtgagcgggatgtccccgccctctgccgcctcttggaactgctggaggagggccagaggctgccggcgcctcctgcctgccctgctgaggttcacgagctcatgaagctgtgctgggcccctagcccacaggaccggccatcattcagcgccctgggcccccagctggacatgctgtggagcggaagccgggggtgtgagactcatgccttcactgctcacccagagggcaaacaccactccctgtccttttctga

SEQ ID NO: 493 - DNA, 4805 bp, Artificial Sequence
  Synthetic Polynucleotide
atggccttaccagtgaccgccttgctcctgccgctggccttgctgctccacgccgccaggccggacatccagatgacacagactacatcctccctgtctgcctctctgggagacagagtcaccatcagttgcagggcaagtcaggacattagtaaatatttaaattggtatcagcagaaaccagatggaactgttaaactcctgatctaccatacatcaagattacactcaggagtcccatcaaggttcagtggcagtgggtctggaacagattattctctcaccattagcaacctggagcaagaagatattgccacttacttttgccaacagggtaatacgcttccgtacacgttcggaggggggaccaagctggagatcacaggtggcggtggctcgggcggtggtgggtcgggtggcggcggatctgaggtgaaactgcaggagtcaggacctggcctggtggcgccctcacagagcctgtccgtcacatgcactgtctcaggggtctcattacccgactatggtgtaagctggattcgccagcctccacgaaagggtctggagtggctgggagtaatatggggtagtgaaaccacatactataattcagctctcaaatccagactgaccatcatcaaggacaactccaagagccaagttttcttaaaaatgaacagtctgcaaactgatgacacagccatttactactgtgccaaacattattactacggtggtagctatgctatggactactggggtcaaggaacctcagtcaccgtctcctcacgcgtagacggtaacgaggagatgggaggaatcactcaaaccccttacaaagtctcaatttcaggaacaactgttatccttacatgtccccagtatcctggcagcgagatcctttggcagcataacgacaagaatatagggggagatgaagacgataagaatatcggatctgacgaggatcacttgagcctgaaagagttctccgagcttgaacaaagcggatattatgtgtgctatccgcgcgggtcaaagccggaagacgctaacttttacctttatctccgagccagagtgtgcgaaaattgcatggaaatggacgttatgtccgttgctacaatagttatcgtagatatatgcatcacgggtggactgcttctgctggtttattattggtccaagaatagaaaggccaaagctaaacccgtgaccagaggcgctggcgcaggcggaaggcaaaggggacaaaacaaagaacggccaccaccagtgccaaatccagattatgagcctattcggaaaggacagagggacctgtactctggcctgaatcagagaagaatctctagaggatctggagcaacaaacttctcactactcaaacaagcaggtgacgtggaggagaatcccgggcctgggatccacatggcacctccaagtgaagagacgcccctgatccctcagcgttcatgcagcctcttgtccacggaggctggtgccctgcatgtgctgctgcccgctcggggccccgggcccccccagcgcctatctttctcctttggggaccacttggctgaggacctgtgcgtgcaggctgccaaggccagcggcatcctgcctgtgtaccactccctctttgctctggccacggaggacctgtcctgctggttccccccgagccacatcttctccgtggaggatgccagcacccaagtcctgctgtacaggattcgcttttacttccccaattggtttgggctggagaagtgccaccgcttcgggctacgcaaggatttggccagtgctatccttgacctgccagtcctggagcacctctttgcccagcaccgcagtgacctggtgagtgggcgcctccccgtgggcctcagtctcaaggagcagggtgagtgtctcagcctggccgtgttggacctggcccggatggcgcgagagcaggcccagcggccgggagagctgctgaagactgtcagctacaaggcctgcctacccccaagcctgcgcgacctgatccagggcctgagcttcgtgacgcggaggcgtattcggaggacggtgcgcagagccctgcgccgcgtggccgcctgccaggcagaccggcactcgctcatggccaagtacatcatggacctggagcggctggatccagccggggccgccgagaccttccacgtgggcctccctggggcccttggtggccacgacgggctggggctgctccgcgtggctggtgacggcggcatcgcctggacccagggagaacaggaggtcctccagcccttctgcgactttccagaaatcgtagacattagcatcaagcaggccccgcgcgttggcccggccggagagcaccgcctggtcactgttaccaggacagacaaccagattttagaggccgagttcccagggctgcccgaggctctgtcgttcgtggcgctcgtggacggctacttccggctgaccacggactcccagcacttcttctgcaaggaggtggcaccgccgaggctgctggaggaagtggccgagcagtgccacggccccatcactctggactttgccatcaacaagctcaagactgggggctcacgtcctggctcctatgttctccgccgcagcccccaggactttgacagcttcctcctcactgtctgtgtccagaacccccttggtcctgattataagggctgcctcatccggcgcagccccacaggaaccttccttctggttggcctcagccgaccccacagcagtcttcgagagctcctggcaacctgctgggatggggggctgcacgtagatggggtggcagtgaccctcacttcctgctgtatccccagacccaaagaaaagtccaacctgatcgtggtccagagaggtcacagcccacccacatcatccttggttcagccccaatcccaataccagctgagtcagatcacatttcacaagatccctgctgacagcctggagtggcatgagaacctgggccatgggtccttcaccaagatttaccggggctgtcgccatgaggtggtggatggggaggcccgaaagacagaggtgctgctgaaggtcatggatgccaagcacaagaactgcatggagtcattcctggaagcagcgagcttgatgagccaagtgtcgtaccggcatctcgtgctgctccacggcgtgtgcatggctggagacagcaccatggtgcaggaatttgtacacctgggggccatagacatgtatctgcgaaaacgtggccacctggtgccagccagctggaagctgcaggtggtcaaacagctggcctacgccctcaactatctggaggacaaaggcctgccccatggcaatgtctctgcccggaaggtgctcctggctcgggagggggctgatgggagcccgcccttcatcaagctgagtgaccctggggtcagccccgctgtgttaagcctggagatgctcaccgacaggatcccctgggtggcccccgagtgtctccgggaggcgcagacacttagcttggaagctgacaagtggggcttcggcgccacggtctgggaagtgtttagtggcgtcaccatgcccatcagtgccctggatcctgctaagaaactccaattttatgaggaccggcagcagctgccggcccccaagtggacagagctggccctgctgattcaacagtgcatggcctatgagccggtccagaggccctccttccgagccgtcattcgtgacctcaatagcctcatctcttcagactatgagctcctctcagaccccacacctggtgccctggcacctcgtgatgggctgtggaatggtgcccagctctatgcctgccaagaccccacgatcttcgaggagagacacctcaagtacatctcacagctgggcaagggcaactttggcagcgtggagctgtgccgctatgacccgctaggcgacaatacaggtgccctggtggccgtgaaacagctgcagcacagcgggccagaccagcagagggactttcagcgggagattcagatcctcaaagcactgcacagtgatttcattgtcaagtatcgtggtgtcagctatggcccgggccgccagagcctgcggctggtcatggagtacctgcccagcggctgcttgcgcgacttcctgcagcggcaccgcgcgcgcctcgatgccagccgcctccttctctattcctcgcagatctgcaagggcatggagtacctgggctcccgccgctgcgtgcaccgcgacctggccgcccgaaacatcctcgtggagagcgaggcacacgtcaagatcgctgacttcggcctagctaagctgctgccgcttgacaaagactactacgtggtccgcgagccaggccagagccccattttctggtatgcccccgaatccctctcggacaacatcttctctcgccagtcagacgtctggagcttcggggtcgtcctgtacgagctcttcacctactgcgacaaaagctgcagcccctcggccgagttcctgcggatgatgggatgtgagcgggatgtccccgccctctgccgcctcttggaactgctggaggagggccagaggctgccggcgcctcctgcctgccctgctgaggttcacgagctcatgaagctgtgctgggcccctagcccacaggaccggccatcattcagcgccctgggcccccagctggacatgctgtggagcggaagccgggggtgtgagactcatgccttcactgctcacccagagggcaaacaccactccctgtccttttctga

SEQ ID NO: 494 - DNA, 4700 bp, Artificial Sequence
  Synthetic Polynucleotide
atggccttaccagtgaccgccttgctcctgccgctggccttgctgctccacgccgccaggccggacatccagatgacacagactacatcctccctgtctgcctctctgggagacagagtcaccatcagttgcagggcaagtcaggacattagtaaatatttaaattggtatcagcagaaaccagatggaactgttaaactcctgatctaccatacatcaagattacactcaggagtcccatcaaggttcagtggcagtgggtctggaacagattattctctcaccattagcaacctggagcaagaagatattgccacttacttttgccaacagggtaatacgcttccgtacacgttcggaggggggaccaagctggagatcacaggtggcggtggctcgggcggtggtgggtcgggtggcggcggatctgaggtgaaactgcaggagtcaggacctggcctggtggcgccctcacagagcctgtccgtcacatgcactgtctcaggggtctcattacccgactatggtgtaagctggattcgccagcctccacgaaagggtctggagtggctgggagtaatatggggtagtgaaaccacatactataattcagctctcaaatccagactgaccatcatcaaggacaactccaagagccaagttttcttaaaaatgaacagtctgcaaactgatgacacagccatttactactgtgccaaacattattactacggtggtagctatgctatggactactggggtcaaggaacctcagtcaccgtctcctcacgcgtattcaagatccccatcgaggaactggaagatcgggtgttcgtgaactgcaacacctctatcacctgggtggaaggcaccgtgggaacactgctgagcgacatcaccagactggacctcggcaagcggattctggaccctcggggcatctacagatgcaacggcaccgacatctacaaggacaaagaaagcaccgtgcaggtccactacagaatgtgccagtcctgcgtggaactggaccctgctacagtggccggcatcatcgtgaccgatgtgatcgctactctgctgctggctctgggagtgttctgcttcgccggacacgaaacaggcagactgtctggcgctgccgatacacaggccctgctgagaaacgaccaagtgtatcagcccctgcgcgacagagatgatgcccagtattctcacctcggcggcaactgggctagaaacaagtctagaggatctggagcaacaaacttctcactactcaaacaagcaggtgacgtggaggagaatcccgggcctgggatccacatggcacctccaagtgaagagacgcccctgatccctcagcgttcatgcagcctcttgtccacggaggctggtgccctgcatgtgctgctgcccgctcggggccccgggcccccccagcgcctatctttctcctttggggaccacttggctgaggacctgtgcgtgcaggctgccaaggccagcggcatcctgcctgtgtaccactccctctttgctctggccacggaggacctgtcctgctggttccccccgagccacatcttctccgtggaggatgccagcacccaagtcctgctgtacaggattcgcttttacttccccaattggtttgggctggagaagtgccaccgcttcgggctacgcaaggatttggccagtgctatccttgacctgccagtcctggagcacctctttgcccagcaccgcagtgacctggtgagtgggcgcctccccgtgggcctcagtctcaaggagcagggtgagtgtctcagcctggccgtgttggacctggcccggatggcgcgagagcaggcccagcggccgggagagctgctgaagactgtcagctacaaggcctgcctacccccaagcctgcgcgacctgatccagggcctgagcttcgtgacgcggaggcgtattcggaggacggtgcgcagagccctgcgccgcgtggccgcctgccaggcagaccggcactcgctcatggccaagtacatcatggacctggagcggctggatccagccggggccgccgagaccttccacgtgggcctccctggggcccttggtggccacgacgggctggggctgctccgcgtggctggtgacggcggcatcgcctggacccagggagaacaggaggtcctccagcccttctgcgactttccagaaatcgtagacattagcatcaagcaggccccgcgcgttggcccggccggagagcaccgcctggtcactgttaccaggacagacaaccagattttagaggccgagttcccagggctgcccgaggctctgtcgttcgtggcgctcgtggacggctacttccggctgaccacggactcccagcacttcttctgcaaggaggtggcaccgccgaggctgctggaggaagtggccgagcagtgccacggccccatcactctggactttgccatcaacaagctcaagactgggggctcacgtcctggctcctatgttctccgccgcagcccccaggactttgacagcttcctcctcactgtctgtgtccagaacccccttggtcctgattataagggctgcctcatccggcgcagccccacaggaaccttccttctggttggcctcagccgaccccacagcagtcttcgagagctcctggcaacctgctgggatggggggctgcacgtagatggggtggcagtgaccctcacttcctgctgtatccccagacccaaagaaaagtccaacctgatcgtggtccagagaggtcacagcccacccacatcatccttggttcagccccaatcccaataccagctgagtcagatcacatttcacaagatccctgctgacagcctggagtggcatgagaacctgggccatgggtccttcaccaagatttaccggggctgtcgccatgaggtggtggatggggaggcccgaaagacagaggtgctgctgaaggtcatggatgccaagcacaagaactgcatggagtcattcctggaagcagcgagcttgatgagccaagtgtcgtaccggcatctcgtgctgctccacggcgtgtgcatggctggagacagcaccatggtgcaggaatttgtacacctgggggccatagacatgtatctgcgaaaacgtggccacctggtgccagccagctggaagctgcaggtggtcaaacagctggcctacgccctcaactatctggaggacaaaggcctgccccatggcaatgtctctgcccggaaggtgctcctggctcgggagggggctgatgggagcccgcccttcatcaagctgagtgaccctggggtcagccccgctgtgttaagcctggagatgctcaccgacaggatcccctgggtggcccccgagtgtctccgggaggcgcagacacttagcttggaagctgacaagtggggcttcggcgccacggtctgggaagtgtttagtggcgtcaccatgcccatcagtgccctggatcctgctaagaaactccaattttatgaggaccggcagcagctgccggcccccaagtggacagagctggccctgctgattcaacagtgcatggcctatgagccggtccagaggccctccttccgagccgtcattcgtgacctcaatagcctcatctcttcagactatgagctcctctcagaccccacacctggtgccctggcacctcgtgatgggctgtggaatggtgcccagctctatgcctgccaagaccccacgatcttcgaggagagacacctcaagtacatctcacagctgggcaagggcaactttggcagcgtggagctgtgccgctatgacccgctaggcgacaatacaggtgccctggtggccgtgaaacagctgcagcacagcgggccagaccagcagagggactttcagcgggagattcagatcctcaaagcactgcacagtgatttcattgtcaagtatcgtggtgtcagctatggcccgggccgccagagcctgcggctggtcatggagtacctgcccagcggctgcttgcgcgacttcctgcagcggcaccgcgcgcgcctcgatgccagccgcctccttctctattcctcgcagatctgcaagggcatggagtacctgggctcccgccgctgcgtgcaccgcgacctggccgcccgaaacatcctcgtggagagcgaggcacacgtcaagatcgctgacttcggcctagctaagctgctgccgcttgacaaagactactacgtggtccgcgagccaggccagagccccattttctggtatgcccccgaatccctctcggacaacatcttctctcgccagtcagacgtctggagcttcggggtcgtcctgtacgagctcttcacctactgcgacaaaagctgcagcccctcggccgagttcctgcggatgatgggatgtgagcgggatgtccccgccctctgccgcctcttggaactgctggaggagggccagaggctgccggcgcctcctgcctgccctgctgaggttcacgagctcatgaagctgtgctgggcccctagcccacaggaccggccatcattcagcgccctgggcccccagctggacatgctgtggagcggaagccgggggtgtgagactcatgccttcactgctcacccagagggcaaacaccactccctgtccttttctga

SEQ ID NO: 495 - DNA, 4730 bp, Artificial Sequence
  Synthetic Polynucleotide
atggccttaccagtgaccgccttgctcctgccgctggccttgctgctccacgccgccaggccggacatccagatgacacagactacatcctccctgtctgcctctctgggagacagagtcaccatcagttgcagggcaagtcaggacattagtaaatatttaaattggtatcagcagaaaccagatggaactgttaaactcctgatctaccatacatcaagattacactcaggagtcccatcaaggttcagtggcagtgggtctggaacagattattctctcaccattagcaacctggagcaagaagatattgccacttacttttgccaacagggtaatacgcttccgtacacgttcggaggggggaccaagctggagatcacaggtggcggtggctcgggcggtggtgggtcgggtggcggcggatctgaggtgaaactgcaggagtcaggacctggcctggtggcgccctcacagagcctgtccgtcacatgcactgtctcaggggtctcattacccgactatggtgtaagctggattcgccagcctccacgaaagggtctggagtggctgggagtaatatggggtagtgaaaccacatactataattcagctctcaaatccagactgaccatcatcaaggacaactccaagagccaagttttcttaaaaatgaacagtctgcaaactgatgacacagccatttactactgtgccaaacattattactacggtggtagctatgctatggactactggggtcaaggaacctcagtcaccgtctcctcacgcgtacagagcatcaagggcaaccacctggtcaaggtgtacgactaccaagaggacggcagcgtgctgctgacatgtgatgccgaggccaagaacatcacctggtttaaggacggcaagatgatcggcttcctgaccgaggacaagaagaagtggaacctgggcagcaacgctaaggaccccagaggcatgtatcagtgcaagggcagccagaacaagagcaagcccctccaggtgtactaccggatgtgccagaactgcatcgagctgaacgccgctaccatcagcggctttctgttcgccgagatcgtgtccatcttcgtgctggccgtgggcgtgtactttatcgctggacaggatggcgtgcggcagagcagagcttccgataagcaaaccctgctgcctaacgaccagctgtaccagcctctgaaggacagagaggacgaccagtacagccacctccagggcaatcagctgagaagaaactctagaggatctggagcaacaaacttctcactactcaaacaagcaggtgacgtggaggagaatcccgggcctgggatccacatggcacctccaagtgaagagacgcccctgatccctcagcgttcatgcagcctcttgtccacggaggctggtgccctgcatgtgctgctgcccgctcggggccccgggcccccccagcgcctatctttctcctttggggaccacttggctgaggacctgtgcgtgcaggctgccaaggccagcggcatcctgcctgtgtaccactccctctttgctctggccacggaggacctgtcctgctggttccccccgagccacatcttctccgtggaggatgccagcacccaagtcctgctgtacaggattcgcttttacttccccaattggtttgggctggagaagtgccaccgcttcgggctacgcaaggatttggccagtgctatccttgacctgccagtcctggagcacctctttgcccagcaccgcagtgacctggtgagtgggcgcctccccgtgggcctcagtctcaaggagcagggtgagtgtctcagcctggccgtgttggacctggcccggatggcgcgagagcaggcccagcggccgggagagctgctgaagactgtcagctacaaggcctgcctacccccaagcctgcgcgacctgatccagggcctgagcttcgtgacgcggaggcgtattcggaggacggtgcgcagagccctgcgccgcgtggccgcctgccaggcagaccggcactcgctcatggccaagtacatcatggacctggagcggctggatccagccggggccgccgagaccttccacgtgggcctccctggggcccttggtggccacgacgggctggggctgctccgcgtggctggtgacggcggcatcgcctggacccagggagaacaggaggtcctccagcccttctgcgactttccagaaatcgtagacattagcatcaagcaggccccgcgcgttggcccggccggagagcaccgcctggtcactgttaccaggacagacaaccagattttagaggccgagttcccagggctgcccgaggctctgtcgttcgtggcgctcgtggacggctacttccggctgaccacggactcccagcacttcttctgcaaggaggtggcaccgccgaggctgctggaggaagtggccgagcagtgccacggccccatcactctggactttgccatcaacaagctcaagactgggggctcacgtcctggctcctatgttctccgccgcagcccccaggactttgacagcttcctcctcactgtctgtgtccagaacccccttggtcctgattataagggctgcctcatccggcgcagccccacaggaaccttccttctggttggcctcagccgaccccacagcagtcttcgagagctcctggcaacctgctgggatggggggctgcacgtagatggggtggcagtgaccctcacttcctgctgtatccccagacccaaagaaaagtccaacctgatcgtggtccagagaggtcacagcccacccacatcatccttggttcagccccaatcccaataccagctgagtcagatcacatttcacaagatccctgctgacagcctggagtggcatgagaacctgggccatgggtccttcaccaagatttaccggggctgtcgccatgaggtggtggatggggaggcccgaaagacagaggtgctgctgaaggtcatggatgccaagcacaagaactgcatggagtcattcctggaagcagcgagcttgatgagccaagtgtcgtaccggcatctcgtgctgctccacggcgtgtgcatggctggagacagcaccatggtgcaggaatttgtacacctgggggccatagacatgtatctgcgaaaacgtggccacctggtgccagccagctggaagctgcaggtggtcaaacagctggcctacgccctcaactatctggaggacaaaggcctgccccatggcaatgtctctgcccggaaggtgctcctggctcgggagggggctgatgggagcccgcccttcatcaagctgagtgaccctggggtcagccccgctgtgttaagcctggagatgctcaccgacaggatcccctgggtggcccccgagtgtctccgggaggcgcagacacttagcttggaagctgacaagtggggcttcggcgccacggtctgggaagtgtttagtggcgtcaccatgcccatcagtgccctggatcctgctaagaaactccaattttatgaggaccggcagcagctgccggcccccaagtggacagagctggccctgctgattcaacagtgcatggcctatgagccggtccagaggccctccttccgagccgtcattcgtgacctcaatagcctcatctcttcagactatgagctcctctcagaccccacacctggtgccctggcacctcgtgatgggctgtggaatggtgcccagctctatgcctgccaagaccccacgatcttcgaggagagacacctcaagtacatctcacagctgggcaagggcaactttggcagcgtggagctgtgccgctatgacccgctaggcgacaatacaggtgccctggtggccgtgaaacagctgcagcacagcgggccagaccagcagagggactttcagcgggagattcagatcctcaaagcactgcacagtgatttcattgtcaagtatcgtggtgtcagctatggcccgggccgccagagcctgcggctggtcatggagtacctgcccagcggctgcttgcgcgacttcctgcagcggcaccgcgcgcgcctcgatgccagccgcctccttctctattcctcgcagatctgcaagggcatggagtacctgggctcccgccgctgcgtgcaccgcgacctggccgcccgaaacatcctcgtggagagcgaggcacacgtcaagatcgctgacttcggcctagctaagctgctgccgcttgacaaagactactacgtggtccgcgagccaggccagagccccattttctggtatgcccccgaatccctctcggacaacatcttctctcgccagtcagacgtctggagcttcggggtcgtcctgtacgagctcttcacctactgcgacaaaagctgcagcccctcggccgagttcctgcggatgatgggatgtgagcgggatgtccccgccctctgccgcctcttggaactgctggaggagggccagaggctgccggcgcctcctgcctgccctgctgaggttcacgagctcatgaagctgtgctgggcccctagcccacaggaccggccatcattcagcgccctgggcccccagctggacatgctgtggagcggaagccgggggtgtgagactcatgccttcactgctcacccagagggcaaacaccactccctgtccttttctga

SEQ ID NO: 496 - DNA, 4679 bp, Artificial Sequence
  Synthetic Polynucleotide
atggccttaccagtgaccgccttgctcctgccgctggccttgctgctccacgccgccaggccggacatccagatgacacagactacatcctccctgtctgcctctctgggagacagagtcaccatcagttgcagggcaagtcaggacattagtaaatatttaaattggtatcagcagaaaccagatggaactgttaaactcctgatctaccatacatcaagattacactcaggagtcccatcaaggttcagtggcagtgggtctggaacagattattctctcaccattagcaacctggagcaagaagatattgccacttacttttgccaacagggtaatacgcttccgtacacgttcggaggggggaccaagctggagatcacaggtggcggtggctcgggcggtggtgggtcgggtggcggcggatctgaggtgaaactgcaggagtcaggacctggcctggtggcgccctcacagagcctgtccgtcacatgcactgtctcaggggtctcattacccgactatggtgtaagctggattcgccagcctccacgaaagggtctggagtggctgggagtaatatggggtagtgaaaccacatactataattcagctctcaaatccagactgaccatcatcaaggacaactccaagagccaagttttcttaaaaatgaacagtctgcaaactgatgacacagccatttactactgtgccaaacattattactacggtggtagctatgctatggactactggggtcaaggaacctcagtcaccgtctcctcacgcgtacagagttttgggttgttggaccctaaattgtgctatctgttggacggaatcctgttcatttacggagtgatcctgaccgcattgttcctgcgggttaagttttccagatccgcagacgcacccgcttaccaacaagggcagaaccaactctacaatgaacttaatttggggcggagggaagagtacgacgttctggacaaaaggaggggacgagatcccgagatgggcggaaagcctcagcgaaggaagaatccgcaagaggggctttataacgaactccagaaagataaaatggcagaagcctatagtgagattgggatgaagggagaaaggaggaggggtaaaggtcacgatgggttgtaccaaggattgagcacagccactaaagatacctatgatgcgctccacatgcaggccctgccgccaagatctagaggatctggagcaacaaacttctcactactcaaacaagcaggtgacgtggaggagaatcccgggcctgggatccacatggcacctccaagtgaagagacgcccctgatccctcagcgttcatgcagcctcttgtccacggaggctggtgccctgcatgtgctgctgcccgctcggggccccgggcccccccagcgcctatctttctcctttggggaccacttggctgaggacctgtgcgtgcaggctgccaaggccagcggcatcctgcctgtgtaccactccctctttgctctggccacggaggacctgtcctgctggttccccccgagccacatcttctccgtggaggatgccagcacccaagtcctgctgtacaggattcgcttttacttccccaattggtttgggctggagaagtgccaccgcttcgggctacgcaaggatttggccagtgctatccttgacctgccagtcctggagcacctctttgcccagcaccgcagtgacctggtgagtgggcgcctccccgtgggcctcagtctcaaggagcagggtgagtgtctcagcctggccgtgttggacctggcccggatggcgcgagagcaggcccagcggccgggagagctgctgaagactgtcagctacaaggcctgcctacccccaagcctgcgcgacctgatccagggcctgagcttcgtgacgcggaggcgtattcggaggacggtgcgcagagccctgcgccgcgtggccgcctgccaggcagaccggcactcgctcatggccaagtacatcatggacctggagcggctggatccagccggggccgccgagaccttccacgtgggcctccctggggcccttggtggccacgacgggctggggctgctccgcgtggctggtgacggcggcatcgcctggacccagggagaacaggaggtcctccagcccttctgcgactttccagaaatcgtagacattagcatcaagcaggccccgcgcgttggcccggccggagagcaccgcctggtcactgttaccaggacagacaaccagattttagaggccgagttcccagggctgcccgaggctctgtcgttcgtggcgctcgtggacggctacttccggctgaccacggactcccagcacttcttctgcaaggaggtggcaccgccgaggctgctggaggaagtggccgagcagtgccacggccccatcactctggactttgccatcaacaagctcaagactgggggctcacgtcctggctcctatgttctccgccgcagcccccaggactttgacagcttcctcctcactgtctgtgtccagaacccccttggtcctgattataagggctgcctcatccggcgcagccccacaggaaccttccttctggttggcctcagccgaccccacagcagtcttcgagagctcctggcaacctgctgggatggggggctgcacgtagatggggtggcagtgaccctcacttcctgctgtatccccagacccaaagaaaagtccaacctgatcgtggtccagagaggtcacagcccacccacatcatccttggttcagccccaatcccaataccagctgagtcagatcacatttcacaagatccctgctgacagcctggagtggcatgagaacctgggccatgggtccttcaccaagatttaccggggctgtcgccatgaggtggtggatggggaggcccgaaagacagaggtgctgctgaaggtcatggatgccaagcacaagaactgcatggagtcattcctggaagcagcgagcttgatgagccaagtgtcgtaccggcatctcgtgctgctccacggcgtgtgcatggctggagacagcaccatggtgcaggaatttgtacacctgggggccatagacatgtatctgcgaaaacgtggccacctggtgccagccagctggaagctgcaggtggtcaaacagctggcctacgccctcaactatctggaggacaaaggcctgccccatggcaatgtctctgcccggaaggtgctcctggctcgggagggggctgatgggagcccgcccttcatcaagctgagtgaccctggggtcagccccgctgtgttaagcctggagatgctcaccgacaggatcccctgggtggcccccgagtgtctccgggaggcgcagacacttagcttggaagctgacaagtggggcttcggcgccacggtctgggaagtgtttagtggcgtcaccatgcccatcagtgccctggatcctgctaagaaactccaattttatgaggaccggcagcagctgccggcccccaagtggacagagctggccctgctgattcaacagtgcatggcctatgagccggtccagaggccctccttccgagccgtcattcgtgacctcaatagcctcatctcttcagactatgagctcctctcagaccccacacctggtgccctggcacctcgtgatgggctgtggaatggtgcccagctctatgcctgccaagaccccacgatcttcgaggagagacacctcaagtacatctcacagctgggcaagggcaactttggcagcgtggagctgtgccgctatgacccgctaggcgacaatacaggtgccctggtggccgtgaaacagctgcagcacagcgggccagaccagcagagggactttcagcgggagattcagatcctcaaagcactgcacagtgatttcattgtcaagtatcgtggtgtcagctatggcccgggccgccagagcctgcggctggtcatggagtacctgcccagcggctgcttgcgcgacttcctgcagcggcaccgcgcgcgcctcgatgccagccgcctccttctctattcctcgcagatctgcaagggcatggagtacctgggctcccgccgctgcgtgcaccgcgacctggccgcccgaaacatcctcgtggagagcgaggcacacgtcaagatcgctgacttcggcctagctaagctgctgccgcttgacaaagactactacgtggtccgcgagccaggccagagccccattttctggtatgcccccgaatccctctcggacaacatcttctctcgccagtcagacgtctggagcttcggggtcgtcctgtacgagctcttcacctactgcgacaaaagctgcagcccctcggccgagttcctgcggatgatgggatgtgagcgggatgtccccgccctctgccgcctcttggaactgctggaggagggccagaggctgccggcgcctcctgcctgccctgctgaggttcacgagctcatgaagctgtgctgggcccctagcccacaggaccggccatcattcagcgccctgggcccccagctggacatgctgtggagcggaagccgggggtgtgagactcatgccttcactgctcacccagagggcaaacaccactccctgtccttttctga

SEQ ID NO: 497 - DNA, 5346 bp, Artificial Sequence
  Synthetic Polynucleotide
atggccttaccagtgaccgccttgctcctgccgctggccttgctgctccacgccgccaggccggacatccagatgacacagactacatcctccctgtctgcctctctgggagacagagtcaccatcagttgcagggcaagtcaggacattagtaagtacctgaactggtatcagcagaaaccagatggaactgttaaactcctgatctaccatacatcaagattacactcaggagtcccatcaaggttcagtggcagtgggtctggaacagattattctctcaccattagcaacctggagcaagaagatattgccacttacttttgccaacagggtaatacgcttccgtacacgttcggaggggggaccaagctggagatcacactcgagggacagcctaaggccaatcctaccgtgacactgttccctccaagcagcgaagaactccaggccaacaaggccacacttgtgtgcctgatctccgacttctaccctggggctgtgacagtggcttggaaggccgatggatctcctgtgaaagccggcgtggaaaccaccaagccatccaagcagagcaacaacaaatacgccgccagctcctacctgagcctgacacctgagcagtggaagtcccacagatcctacagctgccaagtgacccacgaaggcagcaccgtggaaaagacagtggcccctacagagtgcagcggcagagccgattgcggcatcaccagcgccagctaccaccagggcgtgctgagcgccaccatcctgtacgagatcctgctgggcaaggccaccctgtacgccgtgctggtgtctgccctggtgctgatggctatggtcaagcggaaggacagccggggaagggccaagcgatctggatctggagcaacaaacttctcactactcaaacaagcaggtgacgtggaggagaatcccgggcctactagtatggactggatttggcgcatccttttccttgtcggcgctgctaccggcgcgcattccttcgaagtgaaactgcaggagtcaggacctggcctggtggcgccctcacagagcctgtccgtcacatgcactgtctcaggggtctcattacccgactatggtgtaagctggattcgccagcctccacgaaagggtctggagtggctgggagtaatatggggtagtgaaaccacatactataattcagctctcaaatccagactgaccatcatcaaggacaactccaagagccaagttttcttaaaaatgaacagtctgcaaactgatgacacagccatttactactgtgccaaacattattactacggtggtagctatgctatggactactggggccaaggaacctcagtcaccgtctcctcaacgcgtgcctctacaaagggaccctccgtgtttcctctggctcccagcagcaagtctacaagcggaggaacagccgctctgggctgcctggtcaaggattactttcccgagcctgtgaccgtgtcctggaatagcggagcactgacaagcggcgtgcacacctttccagccgtgctgcaaagcagcggcctgtactctctgagcagcgtggtcacagtgcctagctctagcctgggcacccagacctacatctgcaatgtgaaccacaagcctagcaacaccaaggtggacaagagagtggaacccaagagctgtatccccgaggacacattcttcccaagcagcgacgtgccctgcgacgtgaagctggtggaaaagagcttcgagacagacaccaacctgaacttccagaacctgagcgtgatcggcttcagaatcctgctgctgaaagtggccggctttaacctgctgatgaccctgcggctgtggtccagccgcgccaagagaagcggatctggcgtgaagcagaccctgaatttcgacctgctgaagctggctggcgacgtggaatccaacccaggcccttctagaggccatatggcacctccaagtgaagagacgcccctgatccctcagcgttcatgcagcctcttgtccacggaggctggtgccctgcatgtgctgctgcccgctcggggccccgggcccccccagcgcctatctttctcctttggggaccacttggctgaggacctgtgcgtgcaggctgccaaggccagcggcatcctgcctgtgtaccactccctctttgctctggccacggaggacctgtcctgctggttccccccgagccacatcttctccgtggaggatgccagcacccaagtcctgctgtacaggattcgcttttacttccccaattggtttgggctggagaagtgccaccgcttcgggctacgcaaggatttggccagtgctatccttgacctgccagtcctggagcacctctttgcccagcaccgcagtgacctggtgagtgggcgcctccccgtgggcctcagtctcaaggagcagggtgagtgtctcagcctggccgtgttggacctggcccggatggcgcgagagcaggcccagcggccgggagagctgctgaagactgtcagctacaaggcctgcctacccccaagcctgcgcgacctgatccagggcctgagcttcgtgacgcggaggcgtattcggaggacggtgcgcagagccctgcgccgcgtggccgcctgccaggcagaccggcactcgctcatggccaagtacatcatggacctggagcggctggatccagccggggccgccgagaccttccacgtgggcctccctggggcccttggtggccacgacgggctggggctgctccgcgtggctggtgacggcggcatcgcctggacccagggagaacaggaggtcctccagcccttctgcgactttccagaaatcgtagacattagcatcaagcaggccccgcgcgttggcccggccggagagcaccgcctggtcactgttaccaggacagacaaccagattttagaggccgagttcccagggctgcccgaggctctgtcgttcgtggcgctcgtggacggctacttccggctgaccacggactcccagcacttcttctgcaaggaggtggcaccgccgaggctgctggaggaagtggccgagcagtgccacggccccatcactctggactttgccatcaacaagctcaagactgggggctcacgtcctggctcctatgttctccgccgcagcccccaggactttgacagcttcctcctcactgtctgtgtccagaacccccttggtcctgattataagggctgcctcatccggcgcagccccacaggaaccttccttctggttggcctcagccgaccccacagcagtcttcgagagctcctggcaacctgctgggatggggggctgcacgtagatggggtggcagtgaccctcacttcctgctgtatccccagacccaaagaaaagtccaacctgatcgtggtccagagaggtcacagcccacccacatcatccttggttcagccccaatcccaataccagctgagtcagatcacatttcacaagatccctgctgacagcctggagtggcatgagaacctgggccatgggtccttcaccaagatttaccggggctgtcgccatgaggtggtggatggggaggcccgaaagacagaggtgctgctgaaggtcatggatgccaagcacaagaactgcatggagtcattcctggaagcagcgagcttgatgagccaagtgtcgtaccggcatctcgtgctgctccacggcgtgtgcatggctggagacagcaccatggtgcaggaatttgtacacctgggggccatagacatgtatctgcgaaaacgtggccacctggtgccagccagctggaagctgcaggtggtcaaacagctggcctacgccctcaactatctggaggacaaaggcctgccccatggcaatgtctctgcccggaaggtgctcctggctcgggagggggctgatgggagcccgcccttcatcaagctgagtgaccctggggtcagccccgctgtgttaagcctggagatgctcaccgacaggatcccctgggtggcccccgagtgtctccgggaggcgcagacacttagcttggaagctgacaagtggggcttcggcgccacggtctgggaagtgtttagtggcgtcaccatgcccatcagtgccctggatcctgctaagaaactccaattttatgaggaccggcagcagctgccggcccccaagtggacagagctggccctgctgattcaacagtgcatggcctatgagccggtccagaggccctccttccgagccgtcattcgtgacctcaatagcctcatctcttcagactatgagctcctctcagaccccacacctggtgccctggcacctcgtgatgggctgtggaatggtgcccagctctatgcctgccaagaccccacgatcttcgaggagagacacctcaagtacatctcacagctgggcaagggcaactttggcagcgtggagctgtgccgctatgacccgctaggcgacaatacaggtgccctggtggccgtgaaacagctgcagcacagcgggccagaccagcagagggactttcagcgggagattcagatcctcaaagcactgcacagtgatttcattgtcaagtatcgtggtgtcagctatggcccgggccgccagagcctgcggctggtcatggagtacctgcccagcggctgcttgcgcgacttcctgcagcggcaccgcgcgcgcctcgatgccagccgcctccttctctattcctcgcagatctgcaagggcatggagtacctgggctcccgccgctgcgtgcaccgcgacctggccgcccgaaacatcctcgtggagagcgaggcacacgtcaagatcgctgacttcggcctagctaagctgctgccgcttgacaaagactactacgtggtccgcgagccaggccagagccccattttctggtatgcccccgaatccctctcggacaacatcttctctcgccagtcagacgtctggagcttcggggtcgtcctgtacgagctcttcacctactgcgacaaaagctgcagcccctcggccgagttcctgcggatgatgggatgtgagcgggatgtccccgccctctgccgcctcttggaactgctggaggagggccagaggctgccggcgcctcctgcctgccctgctgaggttcacgagctcatgaagctgtgctgggcccctagcccacaggaccggccatcattcagcgccctgggcccccagctggacatgctgtggagcggaagccgggggtgtgagactcatgccttcactgctcacccagagggcaaacaccactccctgtccttttcatga

SEQ ID NO: 498 - DNA, 5411 bp, Artificial Sequence
  Synthetic Polynucleotide
atggccttaccagtgaccgccttgctcctgccgctggccttgctgctccacgccgccaggccggacatccagatgacacagactacatcctccctgtctgcctctctgggagacagagtcaccatcagttgcagggcaagtcaggacattagtaagtacctgaactggtatcagcagaaaccagatggaactgttaaactcctgatctaccatacatcaagattacactcaggagtcccatcaaggttcagtggcagtgggtctggaacagattattctctcaccattagcaacctggagcaagaagatattgccacttacttttgccaacagggtaatacgcttccgtacacgttcggaggggggaccaagctggagatcacactcgagggacagcctaaggccaatcctaccgtgacactgttccctccaagcagcgaagaactccaggccaacaaggccacacttgtgtgcctgatctccgacttctaccctggggctgtgacagtggcttggaaggccgatggatctcctgtgaaagccggcgtggaaaccaccaagccatccaagcagagcaacaacaaatacgccgccagctcctacctgagcctgacacctgagcagtggaagtcccacagatcctacagctgccaagtgacccacgaaggcagcaccgtggaaaagacagtggcccctacagagtgcagccccatcaagaccgatgtgattacaatggaccccaaggacaactgctccaaggacgccaacgataccctgctgctccagctgaccaacaccagcgcctactacatgtacttgttgctgctgctgaagtccgtggtgtacttcgccatcatcacatgctgcctgctgcggagaaccgccttctgctgcaacggcgagaagtctagggccaagcgatctggatctggagcaacaaacttctcactactcaaacaagcaggtgacgtggaggagaatcccgggcctactagtatggactggatttggcgcatccttttccttgtcggcgctgctaccggcgcgcattccttcgaagtgaaactgcaggagtcaggacctggcctggtggcgccctcacagagcctgtccgtcacatgcactgtctcaggggtctcattacccgactatggtgtaagctggattcgccagcctccacgaaagggtctggagtggctgggagtaatatggggtagtgaaaccacatactataattcagctctcaaatccagactgaccatcatcaaggacaactccaagagccaagttttcttaaaaatgaacagtctgcaaactgatgacacagccatttactactgtgccaaacattattactacggtggtagctatgctatggactactggggccaaggaacctcagtcaccgtctcctcaacgcgtgcctctacaaagggaccctccgtgtttcctctggctcccagcagcaagtctacaagcggaggaacagccgctctgggctgcctggtcaaggattactttcccgagcctgtgaccgtgtcctggaatagcggagcactgacaagcggcgtgcacacctttccagccgtgctgcaaagcagcggcctgtactctctgagcagcgtggtcacagtgcctagctctagcctgggcacccagacctacatctgcaatgtgaaccacaagcctagcaacaccaaggtggacaagagagtggaacccaagagctgtgaagtgaaaaccgactccaccgaccacgtgaagcccaaagagacagagaacaccaagcagcccagcaagagctgccacaagcccaaggccatcgtgcacaccgagaaagtgaacatgatgagcctgaccgtgctgggcctgcggatgctgttcgccaaaaccgtggccgtgaacttcctgctgaccgccaagctgttcttcctccgcgccaagagaagcggatctggcgtgaagcagaccctgaatttcgacctgctgaagctggctggcgacgtggaatccaacccaggcccttctagaggccatatggcacctccaagtgaagagacgcccctgatccctcagcgttcatgcagcctcttgtccacggaggctggtgccctgcatgtgctgctgcccgctcggggccccgggcccccccagcgcctatctttctcctttggggaccacttggctgaggacctgtgcgtgcaggctgccaaggccagcggcatcctgcctgtgtaccactccctctttgctctggccacggaggacctgtcctgctggttccccccgagccacatcttctccgtggaggatgccagcacccaagtcctgctgtacaggattcgcttttacttccccaattggtttgggctggagaagtgccaccgcttcgggctacgcaaggatttggccagtgctatccttgacctgccagtcctggagcacctctttgcccagcaccgcagtgacctggtgagtgggcgcctccccgtgggcctcagtctcaaggagcagggtgagtgtctcagcctggccgtgttggacctggcccggatggcgcgagagcaggcccagcggccgggagagctgctgaagactgtcagctacaaggcctgcctacccccaagcctgcgcgacctgatccagggcctgagcttcgtgacgcggaggcgtattcggaggacggtgcgcagagccctgcgccgcgtggccgcctgccaggcagaccggcactcgctcatggccaagtacatcatggacctggagcggctggatccagccggggccgccgagaccttccacgtgggcctccctggggcccttggtggccacgacgggctggggctgctccgcgtggctggtgacggcggcatcgcctggacccagggagaacaggaggtcctccagcccttctgcgactttccagaaatcgtagacattagcatcaagcaggccccgcgcgttggcccggccggagagcaccgcctggtcactgttaccaggacagacaaccagattttagaggccgagttcccagggctgcccgaggctctgtcgttcgtggcgctcgtggacggctacttccggctgaccacggactcccagcacttcttctgcaaggaggtggcaccgccgaggctgctggaggaagtggccgagcagtgccacggccccatcactctggactttgccatcaacaagctcaagactgggggctcacgtcctggctcctatgttctccgccgcagcccccaggactttgacagcttcctcctcactgtctgtgtccagaacccccttggtcctgattataagggctgcctcatccggcgcagccccacaggaaccttccttctggttggcctcagccgaccccacagcagtcttcgagagctcctggcaacctgctgggatggggggctgcacgtagatggggtggcagtgaccctcacttcctgctgtatccccagacccaaagaaaagtccaacctgatcgtggtccagagaggtcacagcccacccacatcatccttggttcagccccaatcccaataccagctgagtcagatcacatttcacaagatccctgctgacagcctggagtggcatgagaacctgggccatgggtccttcaccaagatttaccggggctgtcgccatgaggtggtggatggggaggcccgaaagacagaggtgctgctgaaggtcatggatgccaagcacaagaactgcatggagtcattcctggaagcagcgagcttgatgagccaagtgtcgtaccggcatctcgtgctgctccacggcgtgtgcatggctggagacagcaccatggtgcaggaatttgtacacctgggggccatagacatgtatctgcgaaaacgtggccacctggtgccagccagctggaagctgcaggtggtcaaacagctggcctacgccctcaactatctggaggacaaaggcctgccccatggcaatgtctctgcccggaaggtgctcctggctcgggagggggctgatgggagcccgcccttcatcaagctgagtgaccctggggtcagccccgctgtgttaagcctggagatgctcaccgacaggatcccctgggtggcccccgagtgtctccgggaggcgcagacacttagcttggaagctgacaagtggggcttcggcgccacggtctgggaagtgtttagtggcgtcaccatgcccatcagtgccctggatcctgctaagaaactccaattttatgaggaccggcagcagctgccggcccccaagtggacagagctggccctgctgattcaacagtgcatggcctatgagccggtccagaggccctccttccgagccgtcattcgtgacctcaatagcctcatctcttcagactatgagctcctctcagaccccacacctggtgccctggcacctcgtgatgggctgtggaatggtgcccagctctatgcctgccaagaccccacgatcttcgaggagagacacctcaagtacatctcacagctgggcaagggcaactttggcagcgtggagctgtgccgctatgacccgctaggcgacaatacaggtgccctggtggccgtgaaacagctgcagcacagcgggccagaccagcagagggactttcagcgggagattcagatcctcaaagcactgcacagtgatttcattgtcaagtatcgtggtgtcagctatggcccgggccgccagagcctgcggctggtcatggagtacctgcccagcggctgcttgcgcgacttcctgcagcggcaccgcgcgcgcctcgatgccagccgcctccttctctattcctcgcagatctgcaagggcatggagtacctgggctcccgccgctgcgtgcaccgcgacctggccgcccgaaacatcctcgtggagagcgaggcacacgtcaagatcgctgacttcggcctagctaagctgctgccgcttgacaaagactactacgtggtccgcgagccaggccagagccccattttctggtatgcccccgaatccctctcggacaacatcttctctcgccagtcagacgtctggagcttcggggtcgtcctgtacgagctcttcacctactgcgacaaaagctgcagcccctcggccgagttcctgcggatgatgggatgtgagcgggatgtccccgccctctgccgcctcttggaactgctggaggagggccagaggctgccggcgcctcctgcctgccctgctgaggttcacgagctcatgaagctgtgctgggcccctagcccacaggaccggccatcattcagcgccctgggcccccagctggacatgctgtggagcggaagccgggggtgtgagactcatgccttcactgctcacccagagggcaaacaccactccctgtccttttctga

SEQ ID NO: 499 - DNA, 5319 bp, Artificial Sequence
  Synthetic Polynucleotide
atgctcctgctgctcgtcccagtgctcgaggtgatttttaccctgggaggaaccagagcccagtcggtgacccagcttggcagccacgtctctgtctctgagggagccctggttctgctgaggtgcaactactcatcgtctgttccaccatatctcttctggtatgtgcaataccccaaccaaggactccagcttctcctgaagcacacaacaggggccaccctggttaaaggcatcaacggttttgaggctgaatttaagaagagtgaaacctccttccacctgacgaaaccctcagcccatatgagcgacgcggctgagtacttctgtgctgtgagtgattctagggctgcaggcaacaagctaacttttggaggaggaaccagggtgctagttaaaccaaatatccagaaccctgaccctgccgtgtaccagctgagagactctaaatccagtgacaagtctgtctgcctattcaccgattttgattctcaaacaaatgtgtcacaaagtaaggattctgatgtgtatatcacagacaaaactgtgctagacatgaggtctatggacttcaagagcaacagtgctgtggcctggagcaacaaatctgactttgcatgtgcaaacgccttcaacaacagcattattccagaagacaccttcttccccagcccagaaagttcctgtgatgtcaagctggtcgagaaaagctttgaaacagatacgaacctaaactttcaaaacctgtcagtgattgggttccgaatcctcctcctgaaagtggccgggtttaatctgctcatgacgctgcggctgtggtccagcagggccaagcgatctggatctggagcaacaaacttctcactactcaaacaagcaggtgacgtggaggagaatcccgggcctactagtatgggaatcaggctcctctgtcgtgtggccttttgtttcctggctgtaggcctcgtagatgtgaaagtaacccagagctcgagatatctagtcaaaaggacgggagagaaagtttttctggaatgtgtccaggatatggaccatgaaaatatgttctggtatcgacaagacccaggtctggggctacggctgatctatttctcatatgatgttaaaatgaaagaaaaaggagatattcctgaggggtacagtgtctctagagagaagaaggagcgcttctccctgattctggagtccgccagcaccaaccagacatctatgtacctctgtgccagcagattccccgggacagcctataattcacccctccactttgggaatgggaccaggctcactgtgacagaggacctgaacaaggtgttcccacccgaggtcgctgtgtttgagccatcagaagcagagatctcccacacccaaaaggccacactggtgtgcctggccacaggcttcttccctgaccacgtggagctgagctggtgggtgaatgggaaggaggtgcacagtggggtcagcacggacccgcagcccctcaaggagcagcccgccctcaatgactccagatactgcctgagcagccgcctgagggtctcggccaccttctggcagaacccccgcaaccacttccgctgtcaagtccagttctacgggctctcggagaatgacgagtggacccaggatagggccaaacccgtcacccagatcgtcagcgccgaggcctggggtagagcagactgtggctttacctcggtgtcctaccagcaaggggtcctgtctgccaccatcctctatgagatcctgctagggaaggccaccctgtatgctgtgctggtcagcgcccttgtgttgatggccatggtcaagagaaaggatttccgcgccaagagaagcggatctggcgtgaagcagaccctgaatttcgacctgctgaagctggctggcgacgtggaatccaacccaggcccttctagaggccatatggcacctccaagtgaagagacgcccctgatccctcagcgttcatgcagcctcttgtccacggaggctggtgccctgcatgtgctgctgcccgctcggggccccgggcccccccagcgcctatctttctcctttggggaccacttggctgaggacctgtgcgtgcaggctgccaaggccagcggcatcctgcctgtgtaccactccctctttgctctggccacggaggacctgtcctgctggttccccccgagccacatcttctccgtggaggatgccagcacccaagtcctgctgtacaggattcgcttttacttccccaattggtttgggctggagaagtgccaccgcttcgggctacgcaaggatttggccagtgctatccttgacctgccagtcctggagcacctctttgcccagcaccgcagtgacctggtgagtgggcgcctccccgtgggcctcagtctcaaggagcagggtgagtgtctcagcctggccgtgttggacctggcccggatggcgcgagagcaggcccagcggccgggagagctgctgaagactgtcagctacaaggcctgcctacccccaagcctgcgcgacctgatccagggcctgagcttcgtgacgcggaggcgtattcggaggacggtgcgcagagccctgcgccgcgtggccgcctgccaggcagaccggcactcgctcatggccaagtacatcatggacctggagcggctggatccagccggggccgccgagaccttccacgtgggcctccctggggcccttggtggccacgacgggctggggctgctccgcgtggctggtgacggcggcatcgcctggacccagggagaacaggaggtcctccagcccttctgcgactttccagaaatcgtagacattagcatcaagcaggccccgcgcgttggcccggccggagagcaccgcctggtcactgttaccaggacagacaaccagattttagaggccgagttcccagggctgcccgaggctctgtcgttcgtggcgctcgtggacggctacttccggctgaccacggactcccagcacttcttctgcaaggaggtggcaccgccgaggctgctggaggaagtggccgagcagtgccacggccccatcactctggactttgccatcaacaagctcaagactgggggctcacgtcctggctcctatgttctccgccgcagcccccaggactttgacagcttcctcctcactgtctgtgtccagaacccccttggtcctgattataagggctgcctcatccggcgcagccccacaggaaccttccttctggttggcctcagccgaccccacagcagtcttcgagagctcctggcaacctgctgggatggggggctgcacgtagatggggtggcagtgaccctcacttcctgctgtatccccagacccaaagaaaagtccaacctgatcgtggtccagagaggtcacagcccacccacatcatccttggttcagccccaatcccaataccagctgagtcagatcacatttcacaagatccctgctgacagcctggagtggcatgagaacctgggccatgggtccttcaccaagatttaccggggctgtcgccatgaggtggtggatggggaggcccgaaagacagaggtgctgctgaaggtcatggatgccaagcacaagaactgcatggagtcattcctggaagcagcgagcttgatgagccaagtgtcgtaccggcatctcgtgctgctccacggcgtgtgcatggctggagacagcaccatggtgcaggaatttgtacacctgggggccatagacatgtatctgcgaaaacgtggccacctggtgccagccagctggaagctgcaggtggtcaaacagctggcctacgccctcaactatctggaggacaaaggcctgccccatggcaatgtctctgcccggaaggtgctcctggctcgggagggggctgatgggagcccgcccttcatcaagctgagtgaccctggggtcagccccgctgtgttaagcctggagatgctcaccgacaggatcccctgggtggcccccgagtgtctccgggaggcgcagacacttagcttggaagctgacaagtggggcttcggcgccacggtctgggaagtgtttagtggcgtcaccatgcccatcagtgccctggatcctgctaagaaactccaattttatgaggaccggcagcagctgccggcccccaagtggacagagctggccctgctgattcaacagtgcatggcctatgagccggtccagaggccctccttccgagccgtcattcgtgacctcaatagcctcatctcttcagactatgagctcctctcagaccccacacctggtgccctggcacctcgtgatgggctgtggaatggtgcccagctctatgcctgccaagaccccacgatcttcgaggagagacacctcaagtacatctcacagctgggcaagggcaactttggcagcgtggagctgtgccgctatgacccgctaggcgacaatacaggtgccctggtggccgtgaaacagctgcagcacagcgggccagaccagcagagggactttcagcgggagattcagatcctcaaagcactgcacagtgatttcattgtcaagtatcgtggtgtcagctatggcccgggccgccagagcctgcggctggtcatggagtacctgcccagcggctgcttgcgcgacttcctgcagcggcaccgcgcgcgcctcgatgccagccgcctccttctctattcctcgcagatctgcaagggcatggagtacctgggctcccgccgctgcgtgcaccgcgacctggccgcccgaaacatcctcgtggagagcgaggcacacgtcaagatcgctgacttcggcctagctaagctgctgccgcttgacaaagactactacgtggtccgcgagccaggccagagccccattttctggtatgcccccgaatccctctcggacaacatcttctctcgccagtcagacgtctggagcttcggggtcgtcctgtacgagctcttcacctactgcgacaaaagctgcagcccctcggccgagttcctgcggatgatgggatgtgagcgggatgtccccgccctctgccgcctcttggaactgctggaggagggccagaggctgccggcgcctcctgcctgccctgctgaggttcacgagctcatgaagctgtgctgggcccctagcccacaggaccggccatcattcagcgccctgggcccccagctggacatgctgtggagcggaagccgggggtgtgagactcatgccttcactgctcacccagagggcaaacaccactccctgtccttttca

SEQ ID NO: 500 - DNA, 23 bp, Artificial Sequence
  Synthetic Polynucleotide
gaaaggtaaaggagcagcggcgg

SEQ ID NO: 501 - DNA, 23 bp, Artificial Sequence
  Synthetic Polynucleotide
cttgacggacagtaccgcagagg

SEQ ID NO: 502 - DNA, 23 bp, Artificial Sequence
  Synthetic Polynucleotide
ctcctggaccagatcacaggcgg

SEQ ID NO: 503 - DNA, 23 bp, Artificial Sequence
  Synthetic Polynucleotide
ctcgtcctacgagggtgaggcgg

SEQ ID NO: 504 - DNA, 23 bp, Artificial Sequence
  Synthetic Polynucleotide
cggtttacctctgaagctggcgg

SEQ ID NO: 505 - DNA, 23 bp, Artificial Sequence
  Synthetic Polynucleotide
gtgtgcgctgaggcaagtgtcgg

SEQ ID NO: 506 - DNA, 23 bp, Artificial Sequence
  Synthetic Polynucleotide
ggacctgcacgaagcacaggcgg

SEQ ID NO: 507 - DNA, 23 bp, Artificial Sequence
  Synthetic Polynucleotide
gtggtgctggtccctctcggagg

SEQ ID NO: 508 - DNA, 23 bp, Artificial Sequence
  Synthetic Polynucleotide
atcaaccggttcctcccaggcgg

SEQ ID NO: 509 - DNA, 23 bp, Artificial Sequence
  Synthetic Polynucleotide
gagtggcgctcgtcctacgaggg

SEQ ID NO: 510 - DNA, 23 bp, Artificial Sequence
  Synthetic Polynucleotide
ggagatatccacagaaacgtcgg

SEQ ID NO: 511 - DNA, 23 bp, Artificial Sequence
  Synthetic Polynucleotide
ggtactgtccgtcaagctgcagg

SEQ ID NO: 512 - DNA, 23 bp, Artificial Sequence
  Synthetic Polynucleotide
agattatgccgacaagcccctgg

SEQ ID NO: 513 - DNA, 23 bp, Artificial Sequence
  Synthetic Polynucleotide
aagctcgggacaggatcaaccgg

SEQ ID NO: 514 - DNA, 23 bp, Artificial Sequence
  Synthetic Polynucleotide
tgagacgacgaagctcctgcagg

SEQ ID NO: 515 - DNA, 23 bp, Artificial Sequence
  Synthetic Polynucleotide
gcacgcagctgacgaagctcggg

SEQ ID NO: 516 - DNA, 23 bp, Artificial Sequence
  Synthetic Polynucleotide
tcatcttaaagcctgcgtgaagg

SEQ ID NO: 517 - DNA, 23 bp, Artificial Sequence
  Synthetic Polynucleotide
tgggctatctgaagaggaacggg

SEQ ID NO: 518 - DNA, 23 bp, Artificial Sequence
  Synthetic Polynucleotide
gacgctcttccagctgaagcagg

SEQ ID NO: 519 - DNA, 23 bp, Artificial Sequence
  Synthetic Polynucleotide
cttcctgggcggcagagtcaagg

SEQ ID NO: 520 - DNA, 23 bp, Artificial Sequence
  Synthetic Polynucleotide
cgagtggcgctcgtcctacgagg

SEQ ID NO: 521 - DNA, 23 bp, Artificial Sequence
  Synthetic Polynucleotide
ctaaagctagtcctgaaggtcgg

SEQ ID NO: 522 - DNA, 23 bp, Artificial Sequence
  Synthetic Polynucleotide
ctggtccctctcggaggcgttgg

SEQ ID NO: 523 - DNA, 23 bp, Artificial Sequence
  Synthetic Polynucleotide
ggtcatgtcctgtttacacaggg

SEQ ID NO: 524 - DNA, 23 bp, Artificial Sequence
  Synthetic Polynucleotide
ccccgacactcaggcgagaaggg

SEQ ID NO: 525 - DNA, 23 bp, Artificial Sequence
  Synthetic Polynucleotide
atagtaactggagtcgtggccgg

SEQ ID NO: 526 - DNA, 23 bp, Artificial Sequence
  Synthetic Polynucleotide
agagcactaccttgccgcctggg

SEQ ID NO: 527 - DNA, 23 bp, Artificial Sequence
  Synthetic Polynucleotide
agcccttctcgcctgagtgtcgg

SEQ ID NO: 528 - DNA, 23 bp, Artificial Sequence
  Synthetic Polynucleotide
taggggtcgtgggtgacgtctgg

SEQ ID NO: 529 - DNA, 23 bp, Artificial Sequence
  Synthetic Polynucleotide
tcacaggcggagaccactctagg

SEQ ID NO: 530 - DNA, 23 bp, Artificial Sequence
  Synthetic Polynucleotide
gtgactgaactctcaggatccgg

SEQ ID NO: 531 - DNA, 23 bp, Artificial Sequence
  Synthetic Polynucleotide
atccacagaaacgtcgggatagg

SEQ ID NO: 532 - DNA, 23 bp, Artificial Sequence
  Synthetic Polynucleotide
ctcgtaggacgagcgccactcgg

SEQ ID NO: 533 - DNA, 23 bp, Artificial Sequence
  Synthetic Polynucleotide
cttcgccaacttgtagtacacgg

SEQ ID NO: 534 - DNA, 23 bp, Artificial Sequence
  Synthetic Polynucleotide
agtggtctccgcctgtgatctgg

SEQ ID NO: 535 - DNA, 23 bp, Artificial Sequence
  Synthetic Polynucleotide
ggagcaattgcatccgtgacagg

SEQ ID NO: 536 - DNA, 23 bp, Artificial Sequence
  Synthetic Polynucleotide
agcacgcagctgacgaagctcgg

SEQ ID NO: 537 - DNA, 23 bp, Artificial Sequence
  Synthetic Polynucleotide
accttcaggactagctttagagg

SEQ ID NO: 538 - DNA, 23 bp, Artificial Sequence
  Synthetic Polynucleotide
aataggtgtgctctcattttcgg

SEQ ID NO: 539 - DNA, 23 bp, Artificial Sequence
  Synthetic Polynucleotide
gtcctatcccgacgtttctgtgg

SEQ ID NO: 540 - DNA, 23 bp, Artificial Sequence
  Synthetic Polynucleotide
agccgagtagagaagttatcagg

SEQ ID NO: 541 - DNA, 23 bp, Artificial Sequence
  Synthetic Polynucleotide
cacgctcggactggccgatctgg

SEQ ID NO: 542 - DNA, 23 bp, Artificial Sequence
  Synthetic Polynucleotide
gcccttctcgcctgagtgtcggg

SEQ ID NO: 543 - DNA, 23 bp, Artificial Sequence
  Synthetic Polynucleotide
gagggagcactgtgacacggagg

SEQ ID NO: 544 - DNA, 23 bp, Artificial Sequence
  Synthetic Polynucleotide
cttgtgcttcttgcccatggcgg

SEQ ID NO: 545 - DNA, 23 bp, Artificial Sequence
  Synthetic Polynucleotide
tatctgaagaggaacggggacgg

SEQ ID NO: 546 - DNA, 23 bp, Artificial Sequence
  Synthetic Polynucleotide
catcatagtaactggagtcgtgg

SEQ ID NO: 547 - DNA, 23 bp, Artificial Sequence
  Synthetic Polynucleotide
agataccgtgtactacaagttgg

SEQ ID NO: 548 - DNA, 23 bp, Artificial Sequence
  Synthetic Polynucleotide
gcgctcgtcctacgagggtgagg

SEQ ID NO: 549 - DNA, 23 bp, Artificial Sequence
  Synthetic Polynucleotide
aagctagtcctgaaggtcggagg

SEQ ID NO: 550 - DNA, 14 bp, Artificial Sequence
  Synthetic Polynucleotide
  misc_feature (1)..(14): n is a, c, g, or t
nnnnnnnnnnnnnn

SEQ ID NO: 551 - DNA, 23 bp, Artificial Sequence
  Synthetic Polynucleotide
accccaccaaaacgtccaggagg

SEQ ID NO: 552 - DNA, 23 bp, Artificial Sequence
  Synthetic Polynucleotide
gcaagaactgcagtattcagcgg

SEQ ID NO: 553 - DNA, 23 bp, Artificial Sequence
  Synthetic Polynucleotide
ggtcccaattaacctagcaatgg

SEQ ID NO: 554 - DNA, 23 bp, Artificial Sequence
  Synthetic Polynucleotide
cttctgtgagctcattgcgcggg

SEQ ID NO: 555 - DNA, 23 bp, Artificial Sequence
  Synthetic Polynucleotide
caacacccaacacttataagcgg

SEQ ID NO: 556 - DNA, 23 bp, Artificial Sequence
  Synthetic Polynucleotide
tggggtctttatccgctcagcgg

SEQ ID NO: 557 - DNA, 23 bp, Artificial Sequence
  Synthetic Polynucleotide
acttctgtgagctcattgcgcgg

SEQ ID NO: 558 - DNA, 23 bp, Artificial Sequence
  Synthetic Polynucleotide
caagaactgcagtattcagcggg

SEQ ID NO: 559 - DNA, 23 bp, Artificial Sequence
  Synthetic Polynucleotide
ctcggacagccaggtagcacggg

SEQ ID NO: 560 - DNA, 23 bp, Artificial Sequence
  Synthetic Polynucleotide
gctctagacaacaaaccttgtgg

SEQ ID NO: 561 - DNA, 23 bp, Artificial Sequence
  Synthetic Polynucleotide
tgggaagccgtcctcttctgcgg

SEQ ID NO: 562 - DNA, 23 bp, Artificial Sequence
  Synthetic Polynucleotide
gctgatgccctgaagtatgtcgg

SEQ ID NO: 563 - DNA, 23 bp, Artificial Sequence
  Synthetic Polynucleotide
tgtcatagtaagtgccaatgagg

SEQ ID NO: 564 - DNA, 23 bp, Artificial Sequence
  Synthetic Polynucleotide
gaataatcatgggccagactggg

SEQ ID NO: 565 - DNA, 23 bp, Artificial Sequence
  Synthetic Polynucleotide
gttcttccgcttataagtgttgg

SEQ ID NO: 566 - DNA, 23 bp, Artificial Sequence
  Synthetic Polynucleotide
gaatgtacccccaacatagatgg

SEQ ID NO: 567 - DNA, 23 bp, Artificial Sequence
  Synthetic Polynucleotide
tgagctcattgcgcgggactagg

SEQ ID NO: 568 - DNA, 23 bp, Artificial Sequence
  Synthetic Polynucleotide
tattgaacctcctgagaatgtgg

SEQ ID NO: 569 - DNA, 23 bp, Artificial Sequence
  Synthetic Polynucleotide
agaggtcagggtcacactctcgg

SEQ ID NO: 570 - DNA, 23 bp, Artificial Sequence
  Synthetic Polynucleotide
tctcggacagccaggtagcacgg

SEQ ID NO: 571 - DNA, 23 bp, Artificial Sequence
  Synthetic Polynucleotide
cggcctcctggacgttttggtgg

SEQ ID NO: 572 - DNA, 23 bp, Artificial Sequence
  Synthetic Polynucleotide
caagcagtgcccgtgctacctgg

SEQ ID NO: 573 - DNA, 23 bp, Artificial Sequence
  Synthetic Polynucleotide
gagcttcatgacagactcaccgg

SEQ ID NO: 574 - DNA, 23 bp, Artificial Sequence
  Synthetic Polynucleotide
ttgtggagccgctgaccattggg

SEQ ID NO: 575 - DNA, 23 bp, Artificial Sequence
  Synthetic Polynucleotide
tgtgctttgcagcggcatcccgg

SEQ ID NO: 576 - DNA, 23 bp, Artificial Sequence
  Synthetic Polynucleotide
gagctcattgcgcgggactaggg

SEQ ID NO: 577 - DNA, 23 bp, Artificial Sequence
  Synthetic Polynucleotide
gaaggtcaaaaccgctttccggg

SEQ ID NO: 578 - DNA, 23 bp, Artificial Sequence
  Synthetic Polynucleotide
agaataatcatgggccagactgg

SEQ ID NO: 579 - DNA, 23 bp, Artificial Sequence
  Synthetic Polynucleotide
tgaaggtcaaaaccgctttccgg

SEQ ID NO: 580 - DNA, 23 bp, Artificial Sequence
  Synthetic Polynucleotide
acgaattttgttacccttgcggg

SEQ ID NO: 581 - DNA, 23 bp, Artificial Sequence
  Synthetic Polynucleotide
gctgggcctgctactgttattgg

SEQ ID NO: 582 - DNA, 23 bp, Artificial Sequence
  Synthetic Polynucleotide
tgcgcctgggagctgctgttcgg

SEQ ID NO: 583 - DNA, 23 bp, Artificial Sequence
  Synthetic Polynucleotide
cggctccacaagtaagacagagg

SEQ ID NO: 584 - DNA, 23 bp, Artificial Sequence
  Synthetic Polynucleotide
tgttgcactgtgctttgcagcgg

SEQ ID NO: 585 - DNA, 23 bp, Artificial Sequence
  Synthetic Polynucleotide
attgctggcaccatctgacgtgg

SEQ ID NO: 586 - DNA, 23 bp, Artificial Sequence
  Synthetic Polynucleotide
aagaactgcagtattcagcgggg

SEQ ID NO: 587 - DNA, 23 bp, Artificial Sequence
  Synthetic Polynucleotide
tttactgtcccaatggtcagcgg

SEQ ID NO: 588 - DNA, 23 bp, Artificial Sequence
  Synthetic Polynucleotide
caagggcacgaactgtcacaagg

SEQ ID NO: 589 - DNA, 23 bp, Artificial Sequence
  Synthetic Polynucleotide
aggagtatccacatcctcagcgg

SEQ ID NO: 590 - DNA, 23 bp, Artificial Sequence
  Synthetic Polynucleotide
aaggaaatttccgaggtgggcgg

SEQ ID NO: 591 - DNA, 23 bp, Artificial Sequence
  Synthetic Polynucleotide
tagggaagcagggactgaaacgg

SEQ ID NO: 592 - DNA, 23 bp, Artificial Sequence
  Synthetic Polynucleotide
cttgtggagccgctgaccattgg

SEQ ID NO: 593 - DNA, 23 bp, Artificial Sequence
  Synthetic Polynucleotide
cagacgagctgatgaagtaaagg

SEQ ID NO: 594 - DNA, 23 bp, Artificial Sequence
  Synthetic Polynucleotide
ggagtatccacatcctcagcggg

SEQ ID NO: 595 - DNA, 23 bp, Artificial Sequence
  Synthetic Polynucleotide
tgcagcggcatcccggaaagcgg

SEQ ID NO: 596 - DNA, 23 bp, Artificial Sequence
  Synthetic Polynucleotide
ctgctgctctcaccgctgagcgg

SEQ ID NO: 597 - DNA, 23 bp, Artificial Sequence
  Synthetic Polynucleotide
gggaaagtacacggggatagagg

SEQ ID NO: 598 - DNA, 23 bp, Artificial Sequence
  Synthetic Polynucleotide
gggagaccaagaatacattatgg

SEQ ID NO: 599 - DNA, 23 bp, Artificial Sequence
  Synthetic Polynucleotide
acacgcttccgccaacaaactgg

SEQ ID NO: 600 - DNA, 23 bp, Artificial Sequence
  Synthetic Polynucleotide
ggtaagacacgtctaataactgg

SEQ ID NO: 601 - DNA, 15 bp, Artificial Sequence
  Synthetic Polynucleotide
  misc_feature (1)..(15): n is a, c, g, or t
nnnnnnnnnnnnnnn

SEQ ID NO: 602 - DNA, 23 bp, Artificial Sequence
  Synthetic Polynucleotide
ctattggtgagaacaacgggcgg

SEQ ID NO: 603 - DNA, 23 bp, Artificial Sequence
  Synthetic Polynucleotide
attgatgctacgttgaccggcgg

SEQ ID NO: 604 - DNA, 23 bp, Artificial Sequence
  Synthetic Polynucleotide
tcggtgggaagttcaaccaaggg

SEQ ID NO: 605 - DNA, 23 bp, Artificial Sequence
  Synthetic Polynucleotide
cgcagaggtagacaagccggcgg

SEQ ID NO: 606 - DNA, 23 bp, Artificial Sequence
  Synthetic Polynucleotide
agaggagactcctcaggcggcgg

SEQ ID NO: 607 - DNA, 23 bp, Artificial Sequence
  Synthetic Polynucleotide
tgagtggcagctccataaggggg

SEQ ID NO: 608 - DNA, 23 bp, Artificial Sequence
  Synthetic Polynucleotide
aggcgcgatacctcaggtggggg

SEQ ID NO: 609 - DNA, 23 bp, Artificial Sequence
  Synthetic Polynucleotide
agcgacgattgttggtgcggagg

SEQ ID NO: 610 - DNA, 23 bp, Artificial Sequence
  Synthetic Polynucleotide
gagaggggcgattcctccagcgg

SEQ ID NO: 611 - DNA, 23 bp, Artificial Sequence
  Synthetic Polynucleotide
cggggcactgatgaatgtggagg

SEQ ID NO: 612 - DNA, 23 bp, Artificial Sequence
  Synthetic Polynucleotide
acggactctcctataaccagcgg

SEQ ID NO: 613 - DNA, 23 bp, Artificial Sequence
  Synthetic Polynucleotide
aggcgagatgcttcaggtggcgg

SEQ ID NO: 614 - DNA, 23 bp, Artificial Sequence
  Synthetic Polynucleotide
ctgaggatgtcaggtaggggcgg

SEQ ID NO: 615 - DNA, 23 bp, Artificial Sequence
  Synthetic Polynucleotide
ccctatgggactcaacggggagg

SEQ ID NO: 616 - DNA, 23 bp, Artificial Sequence
  Synthetic Polynucleotide
aaagccgatacaccaggtgaggg

SEQ ID NO: 617 - DNA, 23 bp, Artificial Sequence
  Synthetic Polynucleotide
cgggactccccaaaaggtggggg

SEQ ID NO: 618 - DNA, 23 bp, Artificial Sequence
  Synthetic Polynucleotide
acggaggtgtatgagacccaggg

SEQ ID NO: 619 - DNA, 23 bp, Artificial Sequence
  Synthetic Polynucleotide
cagggagcacagatgccaggcgg

SEQ ID NO: 620 - DNA, 23 bp, Artificial Sequence
  Synthetic Polynucleotide
gcaggtggtggcagaaccgacgg

SEQ ID NO: 621 - DNA, 23 bp, Artificial Sequence
  Synthetic Polynucleotide
gatccgtcgggtgcaggtggtgg

SEQ ID NO: 622 - DNA, 23 bp, Artificial Sequence
  Synthetic Polynucleotide
catggtcggcaggcgtatggggg

SEQ ID NO: 623 - DNA, 23 bp, Artificial Sequence
  Synthetic Polynucleotide
ggggaccggacaaaattgggggg

SEQ ID NO: 624 - DNA, 23 bp, Artificial Sequence
  Synthetic Polynucleotide
aagggagtccacctacaagacgg

SEQ ID NO: 625 - DNA, 23 bp, Artificial Sequence
  Synthetic Polynucleotide
ttccgggactccccaaaaggtgg

SEQ ID NO: 626 - DNA, 23 bp, Artificial Sequence
  Synthetic Polynucleotide
agatccagcgcaacaccctgcgg

SEQ ID NO: 627 - DNA, 23 bp, Artificial Sequence
  Synthetic Polynucleotide
gtaggcatgattccaaccccagg

SEQ ID NO: 628 - DNA, 23 bp, Artificial Sequence
  Synthetic Polynucleotide
gcagtttcccaggaagacgccgg

SEQ ID NO: 629 - DNA, 23 bp, Artificial Sequence
  Synthetic Polynucleotide
tggcatctcctcgtttagggggg

SEQ ID NO: 630 - DNA, 23 bp, Artificial Sequence
  Synthetic Polynucleotide
tgaggataaagattcagaaccgg

SEQ ID NO: 631 - DNA, 23 bp, Artificial Sequence
  Synthetic Polynucleotide
tgattggccccggtgtccagtgg

SEQ ID NO: 632 - DNA, 23 bp, Artificial Sequence
  Synthetic Polynucleotide
tgagctcccgaaagaagctgcgg

SEQ ID NO: 633 - DNA, 23 bp, Artificial Sequence
  Synthetic Polynucleotide
gatgctgggacagctatcagcgg

SEQ ID NO: 634 - DNA, 23 bp, Artificial Sequence
  Synthetic Polynucleotide
tatgctgctcagcaacggagcgg

SEQ ID NO: 635 - DNA, 23 bp, Artificial Sequence
  Synthetic Polynucleotide
ctgttgttcaattcaggggccgg

SEQ ID NO: 636 - DNA, 23 bp, Artificial Sequence
  Synthetic Polynucleotide
agcccagtctacacgggcagcgg

SEQ ID NO: 637 - DNA, 23 bp, Artificial Sequence
  Synthetic Polynucleotide
gttggaggcccccctaaacgagg

SEQ ID NO: 638 - DNA, 23 bp, Artificial Sequence
  Synthetic Polynucleotide
tgacaccatgcagaataccgtgg

SEQ ID NO: 639 - DNA, 23 bp, Artificial Sequence
  Synthetic Polynucleotide
aacagacgagatgcctccggtgg

SEQ ID NO: 640 - DNA, 23 bp, Artificial Sequence
  Synthetic Polynucleotide
gctctacctgagatgcccgaggg

SEQ ID NO: 641 - DNA, 23 bp, Artificial Sequence
  Synthetic Polynucleotide
gttctcaccgttcacagtggcgg

SEQ ID NO: 642 - DNA, 23 bp, Artificial Sequence
  Synthetic Polynucleotide
gagtcggtcatcgctagggaagg

SEQ ID NO: 643 - DNA, 23 bp, Artificial Sequence
  Synthetic Polynucleotide
ctctagcccacacttcgctgggg

SEQ ID NO: 644 - DNA, 23 bp, Artificial Sequence
  Synthetic Polynucleotide
aaatcgctagcatcattcagcgg

SEQ ID NO: 645 - DNA, 23 bp, Artificial Sequence
  Synthetic Polynucleotide
ttcggggtagacctccatagggg

SEQ ID NO: 646 - DNA, 23 bp, Artificial Sequence
  Synthetic Polynucleotide
gttgtgctctctgtaactgcggg

SEQ ID NO: 647 - DNA, 23 bp, Artificial Sequence
  Synthetic Polynucleotide
taggcgcgatacctcaggtgggg

SEQ ID NO: 648 - DNA, 23 bp, Artificial Sequence
  Synthetic Polynucleotide
taagggggtggcgcccatagcgg

SEQ ID NO: 649 - DNA, 23 bp, Artificial Sequence
  Synthetic Polynucleotide
ctgttgatcccatggggtggcgg

SEQ ID NO: 650 - DNA, 23 bp, Artificial Sequence
  Synthetic Polynucleotide
gaggctccaatagatgcgcgtgg

SEQ ID NO: 651 - DNA, 23 bp, Artificial Sequence
  Synthetic Polynucleotide
cagaggtagacaagccggcgggg

SEQ ID NO: 652 - DNA, 19 bp, Artificial Sequence
  Synthetic Polynucleotide
  misc_feature (1)..(19): n is a, c, g, or t
nnnnnnnnnnnnnnnnnnn

SEQ ID NO: 653 - DNA, 23 bp, Artificial Sequence
  Synthetic Polynucleotide
attgacgcgacgctcacaggagg

SEQ ID NO: 654 - DNA, 23 bp, Artificial Sequence
  Synthetic Polynucleotide
ggatgttaaagaccttgaggggg

SEQ ID NO: 655 - DNA, 23 bp, Artificial Sequence
  Synthetic Polynucleotide
gggctcctgacggaaggcaacgg

SEQ ID NO: 656 - DNA, 23 bp, Artificial Sequence
  Synthetic Polynucleotide
gccgaggatgaactaagtagtgg

SEQ ID NO: 657 - DNA, 23 bp, Artificial Sequence
  Synthetic Polynucleotide
gctgtcgatactccaaacccggg

SEQ ID NO: 658 - DNA, 23 bp, Artificial Sequence
  Synthetic Polynucleotide
agcgtaagcagtatgaagagtgg

SEQ ID NO: 659 - DNA, 23 bp, Artificial Sequence
  Synthetic Polynucleotide
cgggaccatacctttcgcgtggg

SEQ ID NO: 660 - DNA, 23 bp, Artificial Sequence
  Synthetic Polynucleotide
cgggccaacaagtcgtcctgggg

SEQ ID NO: 661 - DNA, 23 bp, Artificial Sequence
  Synthetic Polynucleotide
gtggctactgaccaaacccatgg

SEQ ID NO: 662 - DNA, 23 bp, Artificial Sequence
  Synthetic Polynucleotide
agtagccacagaatcaacccggg

SEQ ID NO: 663 - DNA, 23 bp, Artificial Sequence
  Synthetic Polynucleotide
cagtatctgtagatatgcctagg

SEQ ID NO: 664 - DNA, 23 bp, Artificial Sequence
  Synthetic Polynucleotide
tcaacaagccgaccaagagtcgg

SEQ ID NO: 665 - DNA, 23 bp, Artificial Sequence
  Synthetic Polynucleotide
ctagtgaccactccacacaacgg

SEQ ID NO: 666 - DNA, 23 bp, Artificial Sequence
  Synthetic Polynucleotide
tatcaggtggccttaccaacggg

SEQ ID NO: 667 - DNA, 23 bp, Artificial Sequence
  Synthetic Polynucleotide
gtatcaggtggccttaccaacgg

SEQ ID NO: 668 - DNA, 23 bp, Artificial Sequence
  Synthetic Polynucleotide
tcaaattctacccgaggtggtgg

SEQ ID NO: 669 - DNA, 23 bp, Artificial Sequence
  Synthetic Polynucleotide
caaaacctccagacacacctagg

SEQ ID NO: 670 - DNA, 23 bp, Artificial Sequence
  Synthetic Polynucleotide
aggatttcggccgtatcggaagg

SEQ ID NO: 671 - DNA, 23 bp, Artificial Sequence
  Synthetic Polynucleotide
tctgtagacctcgaagtaggggg

SEQ ID NO: 672 - DNA, 23 bp, Artificial Sequence
  Synthetic Polynucleotide
acgggaccatacctttcgcgtgg

SEQ ID NO: 673 - DNA, 23 bp, Artificial Sequence
  Synthetic Polynucleotide
ttctgtagacctcgaagtagggg

SEQ ID NO: 674 - DNA, 23 bp, Artificial Sequence
  Synthetic Polynucleotide
ttcccgagaaagcaccaagaggg

SEQ ID NO: 675 - DNA, 23 bp, Artificial Sequence
  Synthetic Polynucleotide
tgacttttccctcagaaccgtgg

SEQ ID NO: 676 - DNA, 23 bp, Artificial Sequence
  Synthetic Polynucleotide
tatgcgtgccactgcagagacgg

SEQ ID NO: 677 - DNA, 23 bp, Artificial Sequence
  Synthetic Polynucleotide
ggatcgtttacagccaggtgagg

SEQ ID NO: 678 - DNA, 23 bp, Artificial Sequence
  Synthetic Polynucleotide
acaagccgaccaagagtcggtgg

SEQ ID NO: 679 - DNA, 23 bp, Artificial Sequence
  Synthetic Polynucleotide
caagagtcggtggaaccagtcgg

SEQ ID NO: 680 - DNA, 23 bp, Artificial Sequence
  Synthetic Polynucleotide
gacatggaaacttcattccccgg

SEQ ID NO: 681 - DNA, 23 bp, Artificial Sequence
  Synthetic Polynucleotide
atgggtcaacagtagtaggccgg

SEQ ID NO: 682 - DNA, 23 bp, Artificial Sequence
  Synthetic Polynucleotide
ctccgaatcaatacgagagctgg

SEQ ID NO: 683 - DNA, 23 bp, Artificial Sequence
  Synthetic Polynucleotide
ctgtgggctatgaagccagccgg

SEQ ID NO: 684 - DNA, 23 bp, Artificial Sequence
  Synthetic Polynucleotide
gttgctgatcagccaaggcctgg

SEQ ID NO: 685 - DNA, 23 bp, Artificial Sequence
  Synthetic Polynucleotide
ctatatgggtcaacagtagtagg

SEQ ID NO: 686 - DNA, 23 bp, Artificial Sequence
  Synthetic Polynucleotide
acaaggaagcgctcttgactcgg

SEQ ID NO: 687 - DNA, 23 bp, Artificial Sequence
  Synthetic Polynucleotide
agcgagtgctccagtacagccgg

SEQ ID NO: 688 - DNA, 23 bp, Artificial Sequence
  Synthetic Polynucleotide
ggtgaaaacacttgcggtgaggg

SEQ ID NO: 689 - DNA, 23 bp, Artificial Sequence
  Synthetic Polynucleotide
tctcaactgccatatcctagggg

SEQ ID NO: 690 - DNA, 23 bp, Artificial Sequence
  Synthetic Polynucleotide
cagatcctggcggaggcccacgg

SEQ ID NO: 691 - DNA, 23 bp, Artificial Sequence
  Synthetic Polynucleotide
aatccaatgtgtatctggcacgg

SEQ ID NO: 692 - DNA, 23 bp, Artificial Sequence
  Synthetic Polynucleotide
ttcatggctcactaacactccgg

SEQ ID NO: 693 - DNA, 23 bp, Artificial Sequence
  Synthetic Polynucleotide
ctctgcagtggcacgcatagcgg

SEQ ID NO: 694 - DNA, 23 bp, Artificial Sequence
  Synthetic Polynucleotide
catcgtgcaacgaggagaacggg

SEQ ID NO: 695 - DNA, 23 bp, Artificial Sequence
  Synthetic Polynucleotide
ctgttgccaatacacaatcaggg

SEQ ID NO: 696 - DNA, 23 bp, Artificial Sequence
  Synthetic Polynucleotide
gcatcgtgcaacgaggagaacgg

SEQ ID NO: 697 - DNA, 23 bp, Artificial Sequence
  Synthetic Polynucleotide
gacccaggtgaaaacacttgcgg

SEQ ID NO: 698 - DNA, 23 bp, Artificial Sequence
  Synthetic Polynucleotide
tggtgtgtacatgttccgcatgg

SEQ ID NO: 699 - DNA, 23 bp, Artificial Sequence
  Synthetic Polynucleotide
acagagtggaccaccacctcggg

SEQ ID NO: 700 - DNA, 23 bp, Artificial Sequence
  Synthetic Polynucleotide
agtgctccagtacagccggctgg

SEQ ID NO: 701 - DNA, 23 bp, Artificial Sequence
  Synthetic Polynucleotide
acatgattggatggggaggccgg

SEQ ID NO: 702 - DNA, 23 bp, Artificial Sequence
  Synthetic Polynucleotide
gattcggacgtgaagaaggtcgg

SEQ ID NO: 703 - DNA, 21 bp, Artificial Sequence
  Synthetic Polynucleotide
  misc_feature (1)..(21): n is a, c, g, or t
nnnnnnnnnnnnnnnnnnnnn

SEQ ID NO: 704 - DNA, 23 bp, Artificial Sequence
  Synthetic Polynucleotide
acagcaagcacaccatcgggggg

SEQ ID NO: 705 - DNA, 23 bp, Artificial Sequence
  Synthetic Polynucleotide
ggagtggttgatgaagcgggcgg

SEQ ID NO: 706 - DNA, 23 bp, Artificial Sequence
  Synthetic Polynucleotide
cgtggaggacagtcaagccgtgg

SEQ ID NO: 707 - DNA, 23 bp, Artificial Sequence
  Synthetic Polynucleotide
cgtccagctgttcaatgcggggg

SEQ ID NO: 708 - DNA, 23 bp, Artificial Sequence
  Synthetic Polynucleotide
gagcccccgaaaaagaacggggg

SEQ ID NO: 709 - DNA, 23 bp, Artificial Sequence
  Synthetic Polynucleotide
taagcgcaacatcgacgcggggg

SEQ ID NO: 710 - DNA, 23 bp, Artificial Sequence
  Synthetic Polynucleotide
gccccatggggattcaggggcgg

SEQ ID NO: 711 - DNA, 23 bp, Artificial Sequence
  Synthetic Polynucleotide
ccaactactcgccatcccggagg

SEQ ID NO: 712 - DNA, 23 bp, Artificial Sequence
  Synthetic Polynucleotide
aggccgggtggtatgcatggcgg

SEQ ID NO: 713 - DNA, 23 bp, Artificial Sequence
  Synthetic Polynucleotide
agcccccgaaaaagaacgggggg

SEQ ID NO: 714 - DNA, 23 bp, Artificial Sequence
  Synthetic Polynucleotide
tcaagcggaagttcttgacgggg

SEQ ID NO: 715 - DNA, 23 bp, Artificial Sequence
  Synthetic Polynucleotide
acggtgggactgtcttccggagg

SEQ ID NO: 716 - DNA, 23 bp, Artificial Sequence
  Synthetic Polynucleotide
gaagtcttcgaggagaacgacgg

SEQ ID NO: 717 - DNA, 23 bp, Artificial Sequence
  Synthetic Polynucleotide
cttttaggtcgagcgccccgagg

SEQ ID NO: 718 - DNA, 23 bp, Artificial Sequence
  Synthetic Polynucleotide
acgaccccaagtactggcgacgg

SEQ ID NO: 719 - DNA, 23 bp, Artificial Sequence
  Synthetic Polynucleotide
aatccgacgaggaggtgaggcgg

SEQ ID NO: 720 - DNA, 23 bp, Artificial Sequence
  Synthetic Polynucleotide
atctggcccacactgcaaagcgg

SEQ ID NO: 721 - DNA, 23 bp, Artificial Sequence
  Synthetic Polynucleotide
tgtaagcgcaacatcgacgcggg

SEQ ID NO: 722 - DNA, 23 bp, Artificial Sequence
  Synthetic Polynucleotide
gctcggtgttgactgacaagcgg

SEQ ID NO: 723 - DNA, 23 bp, Artificial Sequence
  Synthetic Polynucleotide
cggggggctttgtatgggggagg

SEQ ID NO: 724 - DNA, 23 bp, Artificial Sequence
  Synthetic Polynucleotide
gttcgcaccattttctcgggggg

SEQ ID NO: 725 - DNA, 23 bp, Artificial Sequence
  Synthetic Polynucleotide
ctgtaagcgcaacatcgacgcgg

SEQ ID NO: 726 - DNA, 23 bp, Artificial Sequence
  Synthetic Polynucleotide
catcctcatgcggcactcggagg

SEQ ID NO: 727 - DNA, 23 bp, Artificial Sequence
  Synthetic Polynucleotide
tcttcatccataaatcgccgggg

SEQ ID NO: 728 - DNA, 23 bp, Artificial Sequence
  Synthetic Polynucleotide
gcttgtcagtcaacaccgagcgg

SEQ ID NO: 729 - DNA, 23 bp, Artificial Sequence
  Synthetic Polynucleotide
cacctgcggaccgtgtgctgggg

SEQ ID NO: 730 - DNA, 23 bp, Artificial Sequence
  Synthetic Polynucleotide
tcacagggaagtggatgtagcgg

SEQ ID NO: 731 - DNA, 23 bp, Artificial Sequence
  Synthetic Polynucleotide
cagctggacggcgtggacgacgg

SEQ ID NO: 732 - DNA, 23 bp, Artificial Sequence
  Synthetic Polynucleotide
aagtggacaccctcttgacgcgg

SEQ ID NO: 733 - DNA, 23 bp, Artificial Sequence
  Synthetic Polynucleotide
cattgggaaggactccgctgtgg

SEQ ID NO: 734 - DNA, 23 bp, Artificial Sequence
  Synthetic Polynucleotide
gtcaagcagatctccgacagagg

SEQ ID NO: 735 - DNA, 23 bp, Artificial Sequence
  Synthetic Polynucleotide
tcgagggcatcaacttcaagcgg

SEQ ID NO: 736 - DNA, 23 bp, Artificial Sequence
  Synthetic Polynucleotide
tgttgcagctcaaggcccgaagg

SEQ ID NO: 737 - DNA, 23 bp, Artificial Sequence
  Synthetic Polynucleotide
agatcagccatccacgggcgagg

SEQ ID NO: 738 - DNA, 23 bp, Artificial Sequence
  Synthetic Polynucleotide
tctgcgctccgatcccagcgagg

SEQ ID NO: 739 - DNA, 23 bp, Artificial Sequence
  Synthetic Polynucleotide
ggaggaccatcttccggaagtgg

SEQ ID NO: 740 - DNA, 23 bp, Artificial Sequence
  Synthetic Polynucleotide
agacttcgaggacatggaggtgg

SEQ ID NO: 741 - DNA, 23 bp, Artificial Sequence
  Synthetic Polynucleotide
ccggtctgaagatgagtcggtgg

SEQ ID NO: 742 - DNA, 23 bp, Artificial Sequence
  Synthetic Polynucleotide
cgagcccccgaaaaagaacgggg

SEQ ID NO: 743 - DNA, 23 bp, Artificial Sequence
  Synthetic Polynucleotide
cagtgacggggaatccgacgagg

SEQ ID NO: 744 - DNA, 23 bp, Artificial Sequence
  Synthetic Polynucleotide
gtgaccacaggggcgaatcgagg

SEQ ID NO: 745 - DNA, 23 bp, Artificial Sequence
  Synthetic Polynucleotide
agaacctggaccctccactgcgg

SEQ ID NO: 746 - DNA, 23 bp, Artificial Sequence
  Synthetic Polynucleotide
caacggggccgaaagagtgcggg

SEQ ID NO: 747 - DNA, 23 bp, Artificial Sequence
  Synthetic Polynucleotide
cgaagtccacatagactcggcgg

SEQ ID NO: 748 - DNA, 23 bp, Artificial Sequence
  Synthetic Polynucleotide
agccggggggctttgtatggggg

SEQ ID NO: 749 - DNA, 23 bp, Artificial Sequence
  Synthetic Polynucleotide
cggtggaagctaagagagagcgg

SEQ ID NO: 750 - DNA, 23 bp, Artificial Sequence
  Synthetic Polynucleotide
ggtaacggaacttatagtgctgg

SEQ ID NO: 751 - DNA, 23 bp, Artificial Sequence
  Synthetic Polynucleotide
cagtcaagccgtggaggccgtgg

SEQ ID NO: 752 - DNA, 23 bp, Artificial Sequence
  Synthetic Polynucleotide
aggtcctgccgatcccggagagg

SEQ ID NO: 753 - DNA, 23 bp, Artificial Sequence
  Synthetic Polynucleotide
cagttcgcaccattttctcgggg

SEQ ID NO: 754 - DNA, 21 bp, Artificial Sequence
  Synthetic Polynucleotide
  misc_feature (1)..(21): n is a, c, g, or t
nnnnnnnnnnnnnnnnnnnnn

SEQ ID NO: 755 - DNA, 23 bp, Artificial Sequence
  Synthetic Polynucleotide
gatttggctacgaccagtggggg

SEQ ID NO: 756 - DNA, 23 bp, Artificial Sequence
  Synthetic Polynucleotide
gataggggttcgtctgatggagg

SEQ ID NO: 757 - DNA, 23 bp, Artificial Sequence
  Synthetic Polynucleotide
ggtaaaagacaagggagaggcgg

SEQ ID NO: 758 - DNA, 23 bp, Artificial Sequence
  Synthetic Polynucleotide
acaaagttcatgcaacacggtgg

SEQ ID NO: 759 - DNA, 23 bp, Artificial Sequence
  Synthetic Polynucleotide
ccaccccatcaagagatcggcgg

SEQ ID NO: 760 - DNA, 23 bp, Artificial Sequence
  Synthetic Polynucleotide
gaggaataacacccaaagagcgg

SEQ ID NO: 761 - DNA, 23 bp, Artificial Sequence
  Synthetic Polynucleotide
gaggtactgaccattggcactgg

SEQ ID NO: 762 - DNA, 23 bp, Artificial Sequence
  Synthetic Polynucleotide
ttcccgaaggcatcgtacagtgg

SEQ ID NO: 763 - DNA, 23 bp, Artificial Sequence
  Synthetic Polynucleotide
agccggtcggccattggaagagg

SEQ ID NO: 764 - DNA, 23 bp, Artificial Sequence
  Synthetic Polynucleotide
ttgatgtgggatagcaccaaagg

SEQ ID NO: 765 - DNA, 23 bp, Artificial Sequence
  Synthetic Polynucleotide
cagtgtgctaacgtgatggcagg

SEQ ID NO: 766 - DNA, 23 bp, Artificial Sequence
  Synthetic Polynucleotide
aacctattccccgaatcaagcgg

SEQ ID NO: 767 - DNA, 23 bp, Artificial Sequence
  Synthetic Polynucleotide
ttcactgggtgaggagcggatgg

SEQ ID NO: 768 - DNA, 23 bp, Artificial Sequence
  Synthetic Polynucleotide
aatgacgcaacagcctcatgcgg

SEQ ID NO: 769 - DNA, 23 bp, Artificial Sequence
  Synthetic Polynucleotide
gagtgctttactcccaaagcagg

SEQ ID NO: 770 - DNA, 23 bp, Artificial Sequence
  Synthetic Polynucleotide
tgtttggtccggcagcgtacagg

SEQ ID NO: 771 - DNA, 23 bp, Artificial Sequence
  Synthetic Polynucleotide
aatccaccccatcaagagatcgg

SEQ ID NO: 772 - DNA, 23 bp, Artificial Sequence
  Synthetic Polynucleotide
ggtcgtagccaaatccaaaaagg

SEQ ID NO: 773 - DNA, 23 bp, Artificial Sequence
  Synthetic Polynucleotide
atcagtgaatgccttcccgttgg

SEQ ID NO: 774 - DNA, 23 bp, Artificial Sequence
  Synthetic Polynucleotide
atcaaaaccgagccgtgagcagg

SEQ ID NO: 775 - DNA, 23 bp, Artificial Sequence
  Synthetic Polynucleotide
cgggttggatgattacggttggg

SEQ ID NO: 776 - DNA, 23 bp, Artificial Sequence
  Synthetic Polynucleotide
gcgggttggatgattacggttgg

SEQ ID NO: 777 - DNA, 23 bp, Artificial Sequence
  Synthetic Polynucleotide
ctgagagttagtgctgactccgg

SEQ ID NO: 778 - DNA, 23 bp, Artificial Sequence
  Synthetic Polynucleotide
catcgcacctgctcacggctcgg

SEQ ID NO: 779 - DNA, 23 bp, Artificial Sequence
  Synthetic Polynucleotide
agtggtggcctgtacgctgccgg

SEQ ID NO: 780 - DNA, 23 bp, Artificial Sequence
  Synthetic Polynucleotide
gcaacacggtggttttcaatggg

SEQ ID NO: 781 - DNA, 23 bp, Artificial Sequence
  Synthetic Polynucleotide
gttagtgctgactccggtaaggg

SEQ ID NO: 782 - DNA, 23 bp, Artificial Sequence
  Synthetic Polynucleotide
tgtataactcgatctgtggaagg

SEQ ID NO: 783 - DNA, 23 bp, Artificial Sequence
  Synthetic Polynucleotide
acgttagcacactggttaggtgg

SEQ ID NO: 784 - DNA, 23 bp, Artificial Sequence
  Synthetic Polynucleotide
tgtctcgatcccgccatgcaagg

SEQ ID NO: 785 - DNA, 23 bp, Artificial Sequence
  Synthetic Polynucleotide
tatgctctcacacacgttgcggg

SEQ ID NO: 786 - DNA, 23 bp, Artificial Sequence
  Synthetic Polynucleotide
acacggtgacaacattgtcatgg

SEQ ID NO: 787 - DNA, 23 bp, Artificial Sequence
  Synthetic Polynucleotide
ccttcgtcactgccaaccttagg

SEQ ID NO: 788 - DNA, 23 bp, Artificial Sequence
  Synthetic Polynucleotide
atgacgcaacagcctcatgcggg

SEQ ID NO: 789 - DNA, 23 bp, Artificial Sequence
  Synthetic Polynucleotide
gctgccaagccgacattctcggg

SEQ ID NO: 790 - DNA, 23 bp, Artificial Sequence
  Synthetic Polynucleotide
gtaagtgcattcaccacagttgg

SEQ ID NO: 791 - DNA, 23 bp, Artificial Sequence
  Synthetic Polynucleotide
ctgccatcacgttagcacactgg

SEQ ID NO: 792 - DNA, 23 bp, Artificial Sequence
  Synthetic Polynucleotide
cgccattgtaaacccattgcagg

SEQ ID NO: 793 - DNA, 23 bp, Artificial Sequence
  Synthetic Polynucleotide
gagctctgtgtatagccggtcgg

SEQ ID NO: 794 - DNA, 23 bp, Artificial Sequence
  Synthetic Polynucleotide
tcccgaaggcatcgtacagtggg

SEQ ID NO: 795 - DNA, 23 bp, Artificial Sequence
  Synthetic Polynucleotide
tctggaaggccttgcatggcggg

SEQ ID NO: 796 - DNA, 23 bp, Artificial Sequence
  Synthetic Polynucleotide
gtgtatagccggtcggccattgg

SEQ ID NO: 797 - DNA, 23 bp, Artificial Sequence
  Synthetic Polynucleotide
agtcggtagcaaagtggtatagg

SEQ ID NO: 798 - DNA, 23 bp, Artificial Sequence
  Synthetic Polynucleotide
gcggttatcttctcgagttaagg

SEQ ID NO: 799 - DNA, 23 bp, Artificial Sequence
  Synthetic Polynucleotide
cgataagagacttggttgaacgg

SEQ ID NO: 800 - DNA, 23 bp, Artificial Sequence
  Synthetic Polynucleotide
agaggcgggttggatgattacgg

SEQ ID NO: 801 - DNA, 23 bp, Artificial Sequence
  Synthetic Polynucleotide
ttttccgccgatctcttgatggg

SEQ ID NO: 802 - DNA, 23 bp, Artificial Sequence
  Synthetic Polynucleotide
tccccactgtacgatgccttcgg

SEQ ID NO: 803 - DNA, 23 bp, Artificial Sequence
  Synthetic Polynucleotide
tccctcttccaatggccgaccgg

SEQ ID NO: 804 - DNA, 23 bp, Artificial Sequence
  Synthetic Polynucleotide
ttccgcttgattcggggaatagg

SEQ ID NO: 805 - DNA, 19 bp, Artificial Sequence
  Synthetic Polynucleotide
  misc_feature (1)..(19): n is a, c, g, or t
nnnnnnnnnnnnnnnnnnn

SEQ ID NO: 806 - DNA, 23 bp, Artificial Sequence
  Synthetic Polynucleotide
tgaggcctttcagaaagcatcgg

SEQ ID NO: 807 - DNA, 23 bp, Artificial Sequence
  Synthetic Polynucleotide
ttccgcttggtgaaaacgagggg

SEQ ID NO: 808 - DNA, 23 bp, Artificial Sequence
  Synthetic Polynucleotide
tggagaaagacgtaacttcgggg

SEQ ID NO: 809 - DNA, 23 bp, Artificial Sequence
  Synthetic Polynucleotide
ctgcgcaacttgctcagcaaagg

SEQ ID NO: 810 - DNA, 23 bp, Artificial Sequence
  Synthetic Polynucleotide
ggcccctcgttttcaccaagcgg

SEQ ID NO: 811 - DNA, 23 bp, Artificial Sequence
  Synthetic Polynucleotide
ctggctacaaagctccagaatgg

SEQ ID NO: 812 - DNA, 23 bp, Artificial Sequence
  Synthetic Polynucleotide
atggagaaagacgtaacttcggg

SEQ ID NO: 813 - DNA, 23 bp, Artificial Sequence
  Synthetic Polynucleotide
actcacccatcgcatacctcagg

SEQ ID NO: 814 - DNA, 23 bp, Artificial Sequence
  Synthetic Polynucleotide
gtgtagatggattaggactctgg

SEQ ID NO: 815 - DNA, 23 bp, Artificial Sequence
  Synthetic Polynucleotide
caggactcacacgactattctgg

SEQ ID NO: 816 - DNA, 23 bp, Artificial Sequence
  Synthetic Polynucleotide
attccgcttggtgaaaacgaggg

SEQ ID NO: 817 - DNA, 23 bp, Artificial Sequence
  Synthetic Polynucleotide
gattccgcttggtgaaaacgagg

SEQ ID NO: 818 - DNA, 23 bp, Artificial Sequence
  Synthetic Polynucleotide
tgcggaattgatctgccctgagg

SEQ ID NO: 819 - DNA, 23 bp, Artificial Sequence
  Synthetic Polynucleotide
gattctgaagggtcgagacaagg

SEQ ID NO: 820 - DNA, 23 bp, Artificial Sequence
  Synthetic Polynucleotide
cttgccatagtcagatgcacagg

SEQ ID NO: 821 - DNA, 23 bp, Artificial Sequence
  Synthetic Polynucleotide
atgaatcaagggcagtcccaagg

SEQ ID NO: 822 - DNA, 23 bp, Artificial Sequence
  Synthetic Polynucleotide
aggaatgacatacagactgcagg

SEQ ID NO: 823 - DNA, 23 bp, Artificial Sequence
  Synthetic Polynucleotide
atgacctccaaacaatacactgg

SEQ ID NO: 824 - DNA, 23 bp, Artificial Sequence
  Synthetic Polynucleotide
accaggatggattgaattgaagg

SEQ ID NO: 825 - DNA, 23 bp, Artificial Sequence
  Synthetic Polynucleotide
tggccccgaagcaagcctgatgg

SEQ ID NO: 826 - DNA, 23 bp, Artificial Sequence
  Synthetic Polynucleotide
cgaagcaagcctgatggaacagg

SEQ ID NO: 827 - DNA, 23 bp, Artificial Sequence
  Synthetic Polynucleotide
tccagattgtgtttccattgcgg

SEQ ID NO: 828 - DNA, 23 bp, Artificial Sequence
  Synthetic Polynucleotide
ctgttccatcaggcttgcttcgg

SEQ ID NO: 829 - DNA, 23 bp, Artificial Sequence
  Synthetic Polynucleotide
gggctgcatacatgtgtagatgg

SEQ ID NO: 830 - DNA, 23 bp, Artificial Sequence
  Synthetic Polynucleotide
ttagtctgttgccctcaacatgg

SEQ ID NO: 831 - DNA, 23 bp, Artificial Sequence
  Synthetic Polynucleotide
gttttagatgggattccgcttgg

SEQ ID NO: 832 - DNA, 23 bp, Artificial Sequence
  Synthetic Polynucleotide
taccgttcagagctgccaccagg

SEQ ID NO: 833 - DNA, 23 bp, Artificial Sequence
  Synthetic Polynucleotide
caacaagcttcagttctacaggg

SEQ ID NO: 834 - DNA, 23 bp, Artificial Sequence
  Synthetic Polynucleotide
accgcaatggaaacacaatctgg

SEQ ID NO: 835 - DNA, 23 bp, Artificial Sequence
  Synthetic Polynucleotide
cgagactcataatgtccaaatgg

SEQ ID NO: 836 - DNA, 23 bp, Artificial Sequence
  Synthetic Polynucleotide
tgttccatcaggcttgcttcggg

SEQ ID NO: 837 - DNA, 23 bp, Artificial Sequence
  Synthetic Polynucleotide
ctcagagttagaggtctgtgcgg

SEQ ID NO: 838 - DNA, 23 bp, Artificial Sequence
  Synthetic Polynucleotide
tgggagccccccaggcatgttgg

SEQ ID NO: 839 - DNA, 23 bp, Artificial Sequence
  Synthetic Polynucleotide
tctgttgccctcaacatggttgg

SEQ ID NO: 840 - DNA, 23 bp, Artificial Sequence
  Synthetic Polynucleotide
tgtagatggattaggactctggg

SEQ ID NO: 841 - DNA, 23 bp, Artificial Sequence
  Synthetic Polynucleotide
agtgactgcacatgagcttttgg

SEQ ID NO: 842 - DNA, 23 bp, Artificial Sequence
  Synthetic Polynucleotide
tagcattgcagctagtttactgg

SEQ ID NO: 843 - DNA, 23 bp, Artificial Sequence
  Synthetic Polynucleotide
acgctagctttgtggttccctgg

SEQ ID NO: 844 - DNA, 23 bp, Artificial Sequence
  Synthetic Polynucleotide
cttatggtcaaataacgacttgg

SEQ ID NO: 845 - DNA, 23 bp, Artificial Sequence
  Synthetic Polynucleotide
atcccatctaaaacgtaatgagg

SEQ ID NO: 846 - DNA, 23 bp, Artificial Sequence
  Synthetic Polynucleotide
aatggagaaagacgtaacttcgg

SEQ ID NO: 847 - DNA, 23 bp, Artificial Sequence
  Synthetic Polynucleotide
ggagtatctagtaatttggaagg

SEQ ID NO: 848 - DNA, 23 bp, Artificial Sequence
  Synthetic Polynucleotide
tttcatggtctgactataagggg

SEQ ID NO: 849 - DNA, 23 bp, Artificial Sequence
  Synthetic Polynucleotide
caagtcgttatttgaccataagg

SEQ ID NO: 850 - DNA, 23 bp, Artificial Sequence
  Synthetic Polynucleotide
tgcctcattacgttttagatggg

SEQ ID NO: 851 - DNA, 23 bp, Artificial Sequence
  Synthetic Polynucleotide
ttctttcttatcactcaaatcgg

SEQ ID NO: 852 - DNA, 23 bp, Artificial Sequence
  Synthetic Polynucleotide
attgcatgtgatgcaagttttgg

SEQ ID NO: 853 - DNA, 23 bp, Artificial Sequence
  Synthetic Polynucleotide
ggaaattccaacatgcctggggg

SEQ ID NO: 854 - DNA, 23 bp, Artificial Sequence
  Synthetic Polynucleotide
ggatagaaccaaccatgttgagg

SEQ ID NO: 855 - DNA, 23 bp, Artificial Sequence
  Synthetic Polynucleotide
gctgctctaaagctggggtgtgg

SEQ ID NO: 856 - DNA, 25 bp, Artificial Sequence
  Synthetic Polynucleotide
  misc_feature (1)..(25): n is a, c, g, or t
nnnnnnnnnnnnnnnnnnnnnnnnn

SEQ ID NO: 857 - DNA, 23 bp, Artificial Sequence
  Synthetic Polynucleotide
caagtacagcggcaacgcggtgg

SEQ ID NO: 858 - DNA, 23 bp, Artificial Sequence
  Synthetic Polynucleotide
tcctcatcgagtgtgcccggcgg

SEQ ID NO: 859 - DNA, 23 bp, Artificial Sequence
  Synthetic Polynucleotide
tgcagatctggtgcgtgcggcgg

SEQ ID NO: 860 - DNA, 23 bp, Artificial Sequence
  Synthetic Polynucleotide
ttcctggacgagaacatcggcgg

SEQ ID NO: 861 - DNA, 23 bp, Artificial Sequence
  Synthetic Polynucleotide
agccaagatgaagcagctggcgg

SEQ ID NO: 862 - DNA, 23 bp, Artificial Sequence
  Synthetic Polynucleotide
gacggctgcgaggcaaaccgtgg

SEQ ID NO: 863 - DNA, 23 bp, Artificial Sequence
  Synthetic Polynucleotide
tcgagaaggtcatctacacgggg

SEQ ID NO: 864 - DNA, 23 bp, Artificial Sequence
  Synthetic Polynucleotide
gagggcctcaatggcaatggcgg

SEQ ID NO: 865 - DNA, 23 bp, Artificial Sequence
  Synthetic Polynucleotide
gctgttcatgctgtaagggtcgg

SEQ ID NO: 866 - DNA, 23 bp, Artificial Sequence
  Synthetic Polynucleotide
tccgggaactcatggaggagcgg

SEQ ID NO: 867 - DNA, 23 bp, Artificial Sequence
  Synthetic Polynucleotide
acatccagtcagtattcaagcgg

SEQ ID NO: 868 - DNA, 23 bp, Artificial Sequence
  Synthetic Polynucleotide
ccacccaactgcaactgcgatgg

SEQ ID NO: 869 - DNA, 23 bp, Artificial Sequence
  Synthetic Polynucleotide
acctcaaccagcccaaccacggg

SEQ ID NO: 870 - DNA, 23 bp, Artificial Sequence
  Synthetic Polynucleotide
ctttgcaatggggcaaccgcggg

SEQ ID NO: 871 - DNA, 23 bp, Artificial Sequence
  Synthetic Polynucleotide
agtatgggaaccccaccagccgg

SEQ ID NO: 872 - DNA, 23 bp, Artificial Sequence
  Synthetic Polynucleotide
ttcccggatagaggcgaccgtgg

SEQ ID NO: 873 - DNA, 23 bp, Artificial Sequence
  Synthetic Polynucleotide
actcggtgctgggcaactgccgg

SEQ ID NO: 874 - DNA, 23 bp, Artificial Sequence
  Synthetic Polynucleotide
ggctgtgcccacagactcggcgg

SEQ ID NO: 875 - DNA, 23 bp, Artificial Sequence
  Synthetic Polynucleotide
aggaaggacggcccttcgcgggg

SEQ ID NO: 876 - DNA, 23 bp, Artificial Sequence
  Synthetic Polynucleotide
cagcggttgggcttcttaagcgg

SEQ ID NO: 877 - DNA, 23 bp, Artificial Sequence
  Synthetic Polynucleotide
cgaaaaggccaccagatcgtggg

SEQ ID NO: 878 - DNA, 23 bp, Artificial Sequence
  Synthetic Polynucleotide
ttgcgtcggtaagtccgcctggg

SEQ ID NO: 879 - DNA, 23 bp, Artificial Sequence
  Synthetic Polynucleotide
ggggccagtgaccttcgtgtagg

SEQ ID NO: 880 - DNA, 23 bp, Artificial Sequence
  Synthetic Polynucleotide
ctacgggaagaagcgcaagtggg

SEQ ID NO: 881 - DNA, 23 bp, Artificial Sequence
  Synthetic Polynucleotide
ggacgagaacatcggcggcgtgg

SEQ ID NO: 882 - DNA, 23 bp, Artificial Sequence
  Synthetic Polynucleotide
gtttcataccatgccgcgcgagg

SEQ ID NO: 883 - DNA, 23 bp, Artificial Sequence
  Synthetic Polynucleotide
gcgggcattacgtcggacccagg

SEQ ID NO: 884 - DNA, 23 bp, Artificial Sequence
  Synthetic Polynucleotide
ggaacggagaaagctgcccctgg

SEQ ID NO: 885 - DNA, 23 bp, Artificial Sequence
  Synthetic Polynucleotide
acggcagctaagcgcctcagggg

SEQ ID NO: 886 - DNA, 23 bp, Artificial Sequence
  Synthetic Polynucleotide
gttgaggccgcatctccggctgg

SEQ ID NO: 887 - DNA, 23 bp, Artificial Sequence
  Synthetic Polynucleotide
ggacttaccgacgcaatcgcagg

SEQ ID NO: 888 - DNA, 23 bp, Artificial Sequence
  Synthetic Polynucleotide
cgtgtaggcataggaggacacgg

SEQ ID NO: 889 - DNA, 23 bp, Artificial Sequence
  Synthetic Polynucleotide
aaggagctgaagtggttctgcgg

SEQ ID NO: 890 - DNA, 23 bp, Artificial Sequence
  Synthetic Polynucleotide
tacgggaagaagcgcaagtgggg

SEQ ID NO: 891 - DNA, 23 bp, Artificial Sequence
  Synthetic Polynucleotide
ggttgaaggtttcatagagccgg

SEQ ID NO: 892 - DNA, 23 bp, Artificial Sequence
  Synthetic Polynucleotide
ttccccacctgcgattgcgtcgg

SEQ ID NO: 893 - DNA, 23 bp, Artificial Sequence
  Synthetic Polynucleotide
acagccgctccttgtccccacgg

SEQ ID NO: 894 - DNA, 23 bp, Artificial Sequence
  Synthetic Polynucleotide
actcagcaccaccgtaggccggg

SEQ ID NO: 895 - DNA, 23 bp, Artificial Sequence
  Synthetic Polynucleotide
agaagggggtcgtccccacccgg

SEQ ID NO: 896 - DNA, 23 bp, Artificial Sequence
  Synthetic Polynucleotide
agaccagcgagatgcgggtgggg

SEQ ID NO: 897 - DNA, 23 bp, Artificial Sequence
  Synthetic Polynucleotide
caagtttgggaacagcacctcgg

SEQ ID NO: 898 - DNA, 23 bp, Artificial Sequence
  Synthetic Polynucleotide
ttaccgacgcaatcgcaggtggg

SEQ ID NO: 899 - DNA, 23 bp, Artificial Sequence
  Synthetic Polynucleotide
aacttcctggacgagaacatcgg

SEQ ID NO: 900 - DNA, 23 bp, Artificial Sequence
  Synthetic Polynucleotide
aactcagcaccaccgtaggccgg

SEQ ID NO: 901 - DNA, 23 bp, Artificial Sequence
  Synthetic Polynucleotide
aaccccaccagccggagatgcgg

SEQ ID NO: 902 - DNA, 23 bp, Artificial Sequence
  Synthetic Polynucleotide
cttcaagtacagcggcaacgcgg

SEQ ID NO: 903 - DNA, 23 bp, Artificial Sequence
  Synthetic Polynucleotide
gtagaagaccagcgagatgcggg

SEQ ID NO: 904 - DNA, 23 bp, Artificial Sequence
  Synthetic Polynucleotide
tcgcccaagccccgatcccatgg

SEQ ID NO: 905 - DNA, 23 bp, Artificial Sequence
  Synthetic Polynucleotide
gatctccccagtcttacctccgg

SEQ ID NO: 906 - DNA, 23 bp, Artificial Sequence
  Synthetic Polynucleotide
cgaaagaaacggaaacggtgtgg

SEQ ID NO: 907 - DNA, 13 bp, Artificial Sequence
  Synthetic Polynucleotide
  misc_feature (1)..(13): n is a, c, g, or t
nnnnnnnnnnnnn

SEQ ID NO: 908 - DNA, 23 bp, Artificial Sequence
  Synthetic Polynucleotide
aagaagccttaagacacccgtgg

SEQ ID NO: 909 - DNA, 23 bp, Artificial Sequence
  Synthetic Polynucleotide
gggcccataatcgagcccagggg

SEQ ID NO: 910 - DNA, 23 bp, Artificial Sequence
  Synthetic Polynucleotide
aatacagagcttgtagggaaagg

SEQ ID NO: 911 - DNA, 23 bp, Artificial Sequence
  Synthetic Polynucleotide
gctggagtttggcatcgtgctgg

SEQ ID NO: 912 - DNA, 23 bp, Artificial Sequence
  Synthetic Polynucleotide
cgattatgggcccttcaggatgg

SEQ ID NO: 913 - DNA, 23 bp, Artificial Sequence
  Synthetic Polynucleotide
tttttgaggtcgtgatgtctcgg

SEQ ID NO: 914 - DNA, 23 bp, Artificial Sequence
  Synthetic Polynucleotide
ttttgaggtcgtgatgtctcggg

SEQ ID NO: 915 - DNA, 23 bp, Artificial Sequence
  Synthetic Polynucleotide
caccctcggcttccccttcacgg

SEQ ID NO: 916 - DNA, 23 bp, Artificial Sequence
  Synthetic Polynucleotide
gggtaggctcctcaggttcttgg

SEQ ID NO: 917 - DNA, 23 bp, Artificial Sequence
  Synthetic Polynucleotide
ggctcgattatgggcccttcagg

SEQ ID NO: 918 - DNA, 23 bp, Artificial Sequence
  Synthetic Polynucleotide
gatgatgcaaggctaagaagagg

SEQ ID NO: 919 - DNA, 23 bp, Artificial Sequence
  Synthetic Polynucleotide
ggcagcgttacccagtcccaagg

SEQ ID NO: 920 - DNA, 23 bp, Artificial Sequence
  Synthetic Polynucleotide
aggtaaagctggctttcgagagg

SEQ ID NO: 921 - DNA, 23 bp, Artificial Sequence
  Synthetic Polynucleotide
cattctctggctttaagtcacgg

SEQ ID NO: 922 - DNA, 23 bp, Artificial Sequence
  Synthetic Polynucleotide
ggcccataatcgagcccaggggg

SEQ ID NO: 923 - DNA, 23 bp, Artificial Sequence
  Synthetic Polynucleotide
ccacacccacctgaagccacggg

SEQ ID NO: 924 - DNA, 23 bp, Artificial Sequence
  Synthetic Polynucleotide
gtctcgggagtcggatgttgagg

SEQ ID NO: 925 - DNA, 23 bp, Artificial Sequence
  Synthetic Polynucleotide
tgctattggttcagcaagagagg

SEQ ID NO: 926 - DNA, 23 bp, Artificial Sequence
  Synthetic Polynucleotide
ggtcgtgatgtctcgggagtcgg

SEQ ID NO: 927 - DNA, 23 bp, Artificial Sequence
  Synthetic Polynucleotide
acaaagggtcttaccaagattgg

SEQ ID NO: 928 - DNA, 23 bp, Artificial Sequence
  Synthetic Polynucleotide
cttaagacacccgtggcttcagg

SEQ ID NO: 929 - DNA, 23 bp, Artificial Sequence
  Synthetic Polynucleotide
accctcggcttccccttcacggg

SEQ ID NO: 930 - DNA, 23 bp, Artificial Sequence
  Synthetic Polynucleotide
cagaattgttattcaaaggacgg

SEQ ID NO: 931 - DNA, 23 bp, Artificial Sequence
  Synthetic Polynucleotide
catacagcaagaaacactttcgg

SEQ ID NO: 932 - DNA, 23 bp, Artificial Sequence
  Synthetic Polynucleotide
agtgtttcttgctgtatgttcgg

SEQ ID NO: 933 - DNA, 23 bp, Artificial Sequence
  Synthetic Polynucleotide
taatcgagcccagggggcagggg

SEQ ID NO: 934 - DNA, 23 bp, Artificial Sequence
  Synthetic Polynucleotide
ctctagtggtgcctgtggagagg

SEQ ID NO: 935 - DNA, 23 bp, Artificial Sequence
  Synthetic Polynucleotide
gtttggcatcgtgctggtagagg

SEQ ID NO: 936 - DNA, 23 bp, Artificial Sequence
  Synthetic Polynucleotide
atgacaactactggtttgggagg

SEQ ID NO: 937 - DNA, 23 bp, Artificial Sequence
  Synthetic Polynucleotide
agacacccgtggcttcaggtggg

SEQ ID NO: 938 - DNA, 23 bp, Artificial Sequence
  Synthetic Polynucleotide
gggactgggtaacgctgccatgg

SEQ ID NO: 939 - DNA, 23 bp, Artificial Sequence
  Synthetic Polynucleotide
ataatcgagcccagggggcaggg

SEQ ID NO: 940 - DNA, 23 bp, Artificial Sequence
  Synthetic Polynucleotide
ctgtttcaacattgagagctggg

SEQ ID NO: 941 - DNA, 23 bp, Artificial Sequence
  Synthetic Polynucleotide
gtgaatgacaactactggtttgg

SEQ ID NO: 942 - DNA, 23 bp, Artificial Sequence
  Synthetic Polynucleotide
ggatatgccctgggactgtgagg

SEQ ID NO: 943 - DNA, 23 bp, Artificial Sequence
  Synthetic Polynucleotide
ctgccccctgggctcgattatgg

SEQ ID NO: 944 - DNA, 23 bp, Artificial Sequence
  Synthetic Polynucleotide
tgccccctgggctcgattatggg

SEQ ID NO: 945 - DNA, 23 bp, Artificial Sequence
  Synthetic Polynucleotide
gcttgcaggtagcttctttcagg

SEQ ID NO: 946 - DNA, 23 bp, Artificial Sequence
  Synthetic Polynucleotide
aatagaatagagttcctgagtgg

SEQ ID NO: 947 - DNA, 23 bp, Artificial Sequence
  Synthetic Polynucleotide
aactccagcagtccacagcacgg

SEQ ID NO: 948 - DNA, 23 bp, Artificial Sequence
  Synthetic Polynucleotide
gtgtagtaccttcatgaaaacgg

SEQ ID NO: 949 - DNA, 23 bp, Artificial Sequence
  Synthetic Polynucleotide
gactgggtaacgctgccatgggg

SEQ ID NO: 950 - DNA, 23 bp, Artificial Sequence
  Synthetic Polynucleotide
agggcccataatcgagcccaggg

SEQ ID NO: 951 - DNA, 23 bp, Artificial Sequence
  Synthetic Polynucleotide
ggactgggtaacgctgccatggg

SEQ ID NO: 952 - DNA, 23 bp, Artificial Sequence
  Synthetic Polynucleotide
cataatcgagcccagggggcagg

SEQ ID NO: 953 - DNA, 23 bp, Artificial Sequence
  Synthetic Polynucleotide
aagacacccgtggcttcaggtgg

SEQ ID NO: 954 - DNA, 23 bp, Artificial Sequence
  Synthetic Polynucleotide
catcgtgctggtagaggagctgg

SEQ ID NO: 955 - DNA, 23 bp, Artificial Sequence
  Synthetic Polynucleotide
ctgaagccacgggtgtcttaagg

SEQ ID NO: 956 - DNA, 23 bp, Artificial Sequence
  Synthetic Polynucleotide
ctgagtggacactgtctctaagg

SEQ ID NO: 957 - DNA, 23 bp, Artificial Sequence
  Synthetic Polynucleotide
ttgtaaatacagagcttgtaggg

SEQ ID NO: 958 - DNA, 16 bp, Artificial Sequence
  Synthetic Polynucleotide
  misc_feature (1)..(16): n is a, c, g, or t
nnnnnnnnnnnnnnnn

SEQ ID NO: 959 - DNA, 23 bp, Artificial Sequence
  Synthetic Polynucleotide
acgggctttaatgtctgcgaggg

SEQ ID NO: 960 - DNA, 23 bp, Artificial Sequence
  Synthetic Polynucleotide
cctttcccgaaaagaagccccgg

SEQ ID NO: 961 - DNA, 23 bp, Artificial Sequence
  Synthetic Polynucleotide
tcaaatgaagcgcaacagagggg

SEQ ID NO: 962 - DNA, 23 bp, Artificial Sequence
  Synthetic Polynucleotide
gttcactgacagcagcacggtgg

SEQ ID NO: 963 - DNA, 23 bp, Artificial Sequence
  Synthetic Polynucleotide
atgatcatgtgccaaggctgcgg

SEQ ID NO: 964 - DNA, 23 bp, Artificial Sequence
  Synthetic Polynucleotide
ttccggaagcctctcaggagcgg

SEQ ID NO: 965 - DNA, 23 bp, Artificial Sequence
  Synthetic Polynucleotide
accattgtctgcaggaacggtgg

SEQ ID NO: 966 - DNA, 23 bp, Artificial Sequence
  Synthetic Polynucleotide
agtgacaaagggatcttcggtgg

SEQ ID NO: 967 - DNA, 23 bp, Artificial Sequence
  Synthetic Polynucleotide
gaaggtccgagagttgatcaggg

SEQ ID NO: 968 - DNA, 23 bp, Artificial Sequence
  Synthetic Polynucleotide
tcctggcgccagtccaaccccgg

SEQ ID NO: 969 - DNA, 23 bp, Artificial Sequence
  Synthetic Polynucleotide
caccactgccatcggaggggggg

SEQ ID NO: 970 - DNA, 23 bp, Artificial Sequence
  Synthetic Polynucleotide
tggccgcctctctatggcagtgg

SEQ ID NO: 971 - DNA, 23 bp, Artificial Sequence
  Synthetic Polynucleotide
gactcctctgaaggtaaacgggg

SEQ ID NO: 972 - DNA, 23 bp, Artificial Sequence
  Synthetic Polynucleotide
tccgagagttgatcagggcacgg

SEQ ID NO: 973 - DNA, 23 bp, Artificial Sequence
  Synthetic Polynucleotide
ttacccatgcggctcagagctgg

SEQ ID NO: 974 - DNA, 23 bp, Artificial Sequence
  Synthetic Polynucleotide
cccgtgctctgcaggtccgaggg

SEQ ID NO: 975 - DNA, 23 bp, Artificial Sequence
  Synthetic Polynucleotide
gtatcatctcccactagagacgg

SEQ ID NO: 976 - DNA, 23 bp, Artificial Sequence
  Synthetic Polynucleotide
gtatccgtggactcaccgtgagg

SEQ ID NO: 977 - DNA, 23 bp, Artificial Sequence
  Synthetic Polynucleotide
ctgttctgcaggcaatcagtcgg

SEQ ID NO: 978 - DNA, 23 bp, Artificial Sequence
  Synthetic Polynucleotide
cccaccgttcctgcagacaatgg

SEQ ID NO: 979 - DNA, 23 bp, Artificial Sequence
  Synthetic Polynucleotide
ccacttaccagatatgcccccgg

SEQ ID NO: 980 - DNA, 23 bp, Artificial Sequence
  Synthetic Polynucleotide
aaagtcccgcccatccgggtagg

SEQ ID NO: 981 - DNA, 23 bp, Artificial Sequence
  Synthetic Polynucleotide
acgtatcaaaccaccctgggtgg

SEQ ID NO: 982 - DNA, 23 bp, Artificial Sequence
  Synthetic Polynucleotide
gggaatctgggatcttttggcgg

SEQ ID NO: 983 - DNA, 23 bp, Artificial Sequence
  Synthetic Polynucleotide
cccatgcggctcagagctggcgg

SEQ ID NO: 984 - DNA, 23 bp, Artificial Sequence
  Synthetic Polynucleotide
actgttagaaacgagagccttgg

SEQ ID NO: 985 - DNA, 23 bp, Artificial Sequence
  Synthetic Polynucleotide
cgggggcatatctggtaagtggg

SEQ ID NO: 986 - DNA, 23 bp, Artificial Sequence
  Synthetic Polynucleotide
cagcgctgctattcgtggccagg

SEQ ID NO: 987 - DNA, 23 bp, Artificial Sequence
  Synthetic Polynucleotide
aatgttcactgacagcagcacgg

SEQ ID NO: 988 - DNA, 23 bp, Artificial Sequence
  Synthetic Polynucleotide
acgcatgtcaccattcaccttgg

SEQ ID NO: 989 - DNA, 23 bp, Artificial Sequence
  Synthetic Polynucleotide
ctgcaggcaatcagtcggtgagg

SEQ ID NO: 990 - DNA, 23 bp, Artificial Sequence
  Synthetic Polynucleotide
ctggtggggtacagactccaagg

SEQ ID NO: 991 - DNA, 23 bp, Artificial Sequence
  Synthetic Polynucleotide
aggactgacgatcttcaagccgg

SEQ ID NO: 992 - DNA, 23 bp, Artificial Sequence
  Synthetic Polynucleotide
aaagtcagaggctgtatccgtgg

SEQ ID NO: 993 - DNA, 23 bp, Artificial Sequence
  Synthetic Polynucleotide
cagtctcctacccggatgggcgg

SEQ ID NO: 994 - DNA, 23 bp, Artificial Sequence
  Synthetic Polynucleotide
taaaatgcccatctcgctgtcgg

SEQ ID NO: 995 - DNA, 23 bp, Artificial Sequence
  Synthetic Polynucleotide
ttcacgtatcaaaccaccctggg

SEQ ID NO: 996 - DNA, 23 bp, Artificial Sequence
  Synthetic Polynucleotide
gccgccttatcctctaaatgggg

SEQ ID NO: 997 - DNA, 23 bp, Artificial Sequence
  Synthetic Polynucleotide
aaacagtctcctacccggatggg

SEQ ID NO: 998 - DNA, 23 bp, Artificial Sequence
  Synthetic Polynucleotide
gatgacgaattagggcttggtgg

SEQ ID NO: 999 - DNA, 23 bp, Artificial Sequence
  Synthetic Polynucleotide
atcccatgcgtagcgagccatgg

SEQ ID NO: 1000 - DNA, 23 bp, Artificial Sequence
  Synthetic Polynucleotide
ttgatccttctaggtggggacgg

SEQ ID NO: 1001 - DNA, 23 bp, Artificial Sequence
  Synthetic Polynucleotide
tccgtgccctgatcaactctcgg

SEQ ID NO: 1002 - DNA, 23 bp, Artificial Sequence
  Synthetic Polynucleotide
tggtccagagcagacaggtcggg

SEQ ID NO: 1003 - DNA, 23 bp, Artificial Sequence
  Synthetic Polynucleotide
ccatgcggctcagagctggcggg

SEQ ID NO: 1004 - DNA, 23 bp, Artificial Sequence
  Synthetic Polynucleotide
agtggtgacctctcgcccctcgg

SEQ ID NO: 1005 - DNA, 23 bp, Artificial Sequence
  Synthetic Polynucleotide
ggactgacgatcttcaagccggg

SEQ ID NO: 1006 - DNA, 23 bp, Artificial Sequence
  Synthetic Polynucleotide
tgagcgtgaaaaggctgattcgg

SEQ ID NO: 1007 - DNA, 23 bp, Artificial Sequence
  Synthetic Polynucleotide
ggcattttaagaaacgctctcgg

SEQ ID NO: 1008 - DNA, 23 bp, Artificial Sequence
  Synthetic Polynucleotide
tacctcatcattcgatgggatgg

SEQ ID NO: 1009 - DNA, 10 bp, Artificial Sequence
  Synthetic Polynucleotide
  misc_feature (1)..(10): n is a, c, g, or t
nnnnnnnnnn

SEQ ID NO: 1010 - DNA, 23 bp, Artificial Sequence
  Synthetic Polynucleotide
gcagaatttcgcttagcaggagg

SEQ ID NO: 1011 - DNA, 23 bp, Artificial Sequence
  Synthetic Polynucleotide
taggttccgatggcaaggagagg

SEQ ID NO: 1012 - DNA, 23 bp, Artificial Sequence
  Synthetic Polynucleotide
aacgtgcttagaaaatcctgcgg

SEQ ID NO: 1013 - DNA, 23 bp, Artificial Sequence
  Synthetic Polynucleotide
tctaccccaacagcgacatgggg

SEQ ID NO: 1014 - DNA, 23 bp, Artificial Sequence
  Synthetic Polynucleotide
aatgctttccagctctccaatgg

SEQ ID NO: 1015 - DNA, 23 bp, Artificial Sequence
  Synthetic Polynucleotide
acaccacttcgctgagagagggg

SEQ ID NO: 1016 - DNA, 23 bp, Artificial Sequence
  Synthetic Polynucleotide
agtaaaggttcagcgagagctgg

SEQ ID NO: 1017 - DNA, 23 bp, Artificial Sequence
  Synthetic Polynucleotide
agtttgcaggggttgtggatcgg

SEQ ID NO: 1018 - DNA, 23 bp, Artificial Sequence
  Synthetic Polynucleotide
ggagagagccaaagtaccatagg

SEQ ID NO: 1019 - DNA, 23 bp, Artificial Sequence
  Synthetic Polynucleotide
gaacaccacttcgctgagagagg

SEQ ID NO: 1020 - DNA, 23 bp, Artificial Sequence
  Synthetic Polynucleotide
ggatgctgttctcagactgacgg

SEQ ID NO: 1021 - DNA, 23 bp, Artificial Sequence
  Synthetic Polynucleotide
cggcattcagattccaaacaagg

SEQ ID NO: 1022 - DNA, 23 bp, Artificial Sequence
  Synthetic Polynucleotide
cttctaccccaacagcgacatgg

SEQ ID NO: 1023 - DNA, 23 bp, Artificial Sequence
  Synthetic Polynucleotide
ccggtgttcacgtcttttggtgg

SEQ ID NO: 1024 - DNA, 23 bp, Artificial Sequence
  Synthetic Polynucleotide
ctcagaacttataccacgaaagg

SEQ ID NO: 1025 - DNA, 23 bp, Artificial Sequence
  Synthetic Polynucleotide
ttgtgtaggttccgatggcaagg

SEQ ID NO: 1026 - DNA, 23 bp, Artificial Sequence
  Synthetic Polynucleotide
ttcaccataatcccatcttgcgg

SEQ ID NO: 1027 - DNA, 23 bp, Artificial Sequence
  Synthetic Polynucleotide
gacacaatgcaacttccgtaagg

SEQ ID NO: 1028 - DNA, 23 bp, Artificial Sequence
  Synthetic Polynucleotide
accaattggctgctagaatgggg

SEQ ID NO: 1029 - DNA, 23 bp, Artificial Sequence
  Synthetic Polynucleotide
cgcttctcaaaccaaatagctgg

SEQ ID NO: 1030 - DNA, 23 bp, Artificial Sequence
  Synthetic Polynucleotide
catcttgtctcaggtcatcacgg

SEQ ID NO: 1031 - DNA, 23 bp, Artificial Sequence
  Synthetic Polynucleotide
cgttccccatgtcgctgttgggg

SEQ ID NO: 1032 - DNA, 23 bp, Artificial Sequence
  Synthetic Polynucleotide
tagccctatctgcgaaaaacagg

SEQ ID NO: 1033 - DNA, 23 bp, Artificial Sequence
  Synthetic Polynucleotide
aaaggatcttcgaagacaactgg

SEQ ID NO: 1034 - DNA, 23 bp, Artificial Sequence
  Synthetic Polynucleotide
ttttggctcctttcggatgatgg

SEQ ID NO: 1035 - DNA, 23 bp, Artificial Sequence
  Synthetic Polynucleotide
aagcctgtttttcgcagataggg

SEQ ID NO: 1036 - DNA, 23 bp, Artificial Sequence
  Synthetic Polynucleotide
aggacccttttcactcttggagg

SEQ ID NO: 1037 - DNA, 23 bp, Artificial Sequence
  Synthetic Polynucleotide
cggtgttcacgtcttttggtggg

SEQ ID NO: 1038 - DNA, 23 bp, Artificial Sequence
  Synthetic Polynucleotide
gcatcactaacactactatcagg

SEQ ID NO: 1039 - DNA, 23 bp, Artificial Sequence
  Synthetic Polynucleotide
cgctctatcccacacttagcagg

SEQ ID NO: 1040 - DNA, 23 bp, Artificial Sequence
  Synthetic Polynucleotide
cttagcaggttgcaggccattgg

SEQ ID NO: 1041 - DNA, 23 bp, Artificial Sequence
  Synthetic Polynucleotide
ttgaataaggatcagcctacggg

SEQ ID NO: 1042 - DNA, 23 bp, Artificial Sequence
  Synthetic Polynucleotide
gggaccattgcacttccgtcagg

SEQ ID NO: 1043 - DNA, 23 bp, Artificial Sequence
  Synthetic Polynucleotide
cataccattctggcacgctttgg

SEQ ID NO: 1044 - DNA, 23 bp, Artificial Sequence
  Synthetic Polynucleotide
tagactcaccagagatattgtgg

SEQ ID NO: 1045 - DNA, 23 bp, Artificial Sequence
  Synthetic Polynucleotide
tgccctaaaggacacagtattgg

SEQ ID NO: 1046 - DNA, 23 bp, Artificial Sequence
  Synthetic Polynucleotide
agatgttgttgtccctactatgg

SEQ ID NO: 1047 - DNA, 23 bp, Artificial Sequence
  Synthetic Polynucleotide
ctgcagccaacatgcgaacttgg

SEQ ID NO: 1048 - DNA, 23 bp, Artificial Sequence
  Synthetic Polynucleotide
cctttagggcagctgatattcgg

SEQ ID NO: 1049 - DNA, 23 bp, Artificial Sequence
  Synthetic Polynucleotide
tcttgggttttggctcctttcgg

SEQ ID NO: 1050 - DNA, 23 bp, Artificial Sequence
  Synthetic Polynucleotide
tccccattctagcagccaattgg

SEQ ID NO: 1051 - DNA, 23 bp, Artificial Sequence
  Synthetic Polynucleotide
tgtggatggcatgggcattacgg

SEQ ID NO: 1052 - DNA, 23 bp, Artificial Sequence
  Synthetic Polynucleotide
tacagtaagtcacggctgtctgg

SEQ ID NO: 1053 - DNA, 23 bp, Artificial Sequence
  Synthetic Polynucleotide
gttggatgccagctgtgcagcgg

SEQ ID NO: 1054 - DNA, 23 bp, Artificial Sequence
  Synthetic Polynucleotide
ttagggcagctgatattcggagg

SEQ ID NO: 1055 - DNA, 23 bp, Artificial Sequence
  Synthetic Polynucleotide
agcatccttacagtaagtcacgg

SEQ ID NO: 1056 - DNA, 23 bp, Artificial Sequence
  Synthetic Polynucleotide
aactcaccatatgcaggtggagg

SEQ ID NO: 1057 - DNA, 23 bp, Artificial Sequence
  Synthetic Polynucleotide
gatcctctttcagtgcacgcagg

SEQ ID NO: 1058 - DNA, 23 bp, Artificial Sequence
  Synthetic Polynucleotide
cgtaactcaccatatgcaggtgg

SEQ ID NO: 1059 - DNA, 23 bp, Artificial Sequence
  Synthetic Polynucleotide
gacacatccatgatacaagaagg

SEQ ID NO: 1060 - DNA, 18 bp, Artificial Sequence
  Synthetic Polynucleotide
  misc_feature (1)..(18): n is a, c, g, or t
nnnnnnnnnnnnnnnnnn

SEQ ID NO: 1061 - DNA, 23 bp, Artificial Sequence
  Synthetic Polynucleotide
tccagtttgagcacataaagtgg

SEQ ID NO: 1062 - DNA, 23 bp, Artificial Sequence
  Synthetic Polynucleotide
gtcccgagtactcctgaagccgg

SEQ ID NO: 1063 - DNA, 23 bp, Artificial Sequence
  Synthetic Polynucleotide
atcctggaaccgaaacaacaggg

SEQ ID NO: 1064 - DNA, 23 bp, Artificial Sequence
  Synthetic Polynucleotide
aggagtactcgggacttgggagg

SEQ ID NO: 1065 - DNA, 23 bp, Artificial Sequence
  Synthetic Polynucleotide
ttgtttcggttccaggatggtgg

SEQ ID NO: 1066 - DNA, 23 bp, Artificial Sequence
  Synthetic Polynucleotide
ttacctgaagagaacttggccgg

SEQ ID NO: 1067 - DNA, 23 bp, Artificial Sequence
  Synthetic Polynucleotide
cttcaggagtactcgggacttgg

SEQ ID NO: 1068 - DNA, 23 bp, Artificial Sequence
  Synthetic Polynucleotide
ggccggcttcaggagtactcggg

SEQ ID NO: 1069 - DNA, 23 bp, Artificial Sequence
  Synthetic Polynucleotide
tggccggcttcaggagtactcgg

SEQ ID NO: 1070 - DNA, 23 bp, Artificial Sequence
  Synthetic Polynucleotide
ttcaggagtactcgggacttggg

SEQ ID NO: 1071 - DNA, 23 bp, Artificial Sequence
  Synthetic Polynucleotide
ctctcttcttaccatctcttcgg

SEQ ID NO: 1072 - DNA, 23 bp, Artificial Sequence
  Synthetic Polynucleotide
catcctggaaccgaaacaacagg

SEQ ID NO: 1073 - DNA, 23 bp, Artificial Sequence
  Synthetic Polynucleotide
aagccggccaagttctcttcagg

SEQ ID NO: 1074 - DNA, 23 bp, Artificial Sequence
  Synthetic Polynucleotide
tctcttcttaccatctcttcggg

SEQ ID NO: 1075 - DNA, 23 bp, Artificial Sequence
  Synthetic Polynucleotide
aaccctgttgtttcggttccagg

SEQ ID NO: 1076 - DNA, 23 bp, Artificial Sequence
  Synthetic Polynucleotide
cataaagtggcagtatgccgtgg

SEQ ID NO: 1077 - DNA, 23 bp, Artificial Sequence
  Synthetic Polynucleotide
gcagcacgcccataattccgggg

SEQ ID NO: 1078 - DNA, 23 bp, Artificial Sequence
  Synthetic Polynucleotide
ttccaggggtcctacacaagagg

SEQ ID NO: 1079 - DNA, 23 bp, Artificial Sequence
  Synthetic Polynucleotide
acgtcgagcacctccctggaagg

SEQ ID NO: 1080 - DNA, 23 bp, Artificial Sequence
  Synthetic Polynucleotide
gtcaaagaacaggcatttcacgg

SEQ ID NO: 1081 - DNA, 23 bp, Artificial Sequence
  Synthetic Polynucleotide
ttcgttctcagcttccacttcgg

SEQ ID NO: 1082 - DNA, 23 bp, Artificial Sequence
  Synthetic Polynucleotide
cggaattatgggcgtgctgcagg

SEQ ID NO: 1083 - DNA, 23 bp, Artificial Sequence
  Synthetic Polynucleotide
ctgcagcacgcccataattccgg

SEQ ID NO: 1084 - DNA, 23 bp, Artificial Sequence
  Synthetic Polynucleotide
tgcagcacgcccataattccggg

SEQ ID NO: 1085 - DNA, 23 bp, Artificial Sequence
  Synthetic Polynucleotide
gccactttatgtgctcaaactgg

SEQ ID NO: 1086 - DNA, 23 bp, Artificial Sequence
  Synthetic Polynucleotide
ctttcttgctgaggttgatccgg

SEQ ID NO: 1087 - DNA, 23 bp, Artificial Sequence
  Synthetic Polynucleotide
gtttgcctggtaggagctcttgg

SEQ ID NO: 1088 - DNA, 23 bp, Artificial Sequence
  Synthetic Polynucleotide
cgggacttgggaggtttgcctgg

SEQ ID NO: 1089 - DNA, 23 bp, Artificial Sequence
  Synthetic Polynucleotide
aggcaaattccccggaattatgg

SEQ ID NO: 1090 - DNA, 23 bp, Artificial Sequence
  Synthetic Polynucleotide
cacgaagcaagggaaaacagcgg

SEQ ID NO: 1091 - DNA, 23 bp, Artificial Sequence
  Synthetic Polynucleotide
ccgagtcatccactattccgggg

SEQ ID NO: 1092 - DNA, 23 bp, Artificial Sequence
  Synthetic Polynucleotide
gttcgtttcacatctataggagg

SEQ ID NO: 1093 - DNA, 23 bp, Artificial Sequence
  Synthetic Polynucleotide
gtggactgcataccagaacgagg

SEQ ID NO: 1094 - DNA, 23 bp, Artificial Sequence
  Synthetic Polynucleotide
cttggggcagcatctaaccctgg

SEQ ID NO: 1095 - DNA, 23 bp, Artificial Sequence
  Synthetic Polynucleotide
gaaagtgtggcacattgccatgg

SEQ ID NO: 1096 - DNA, 23 bp, Artificial Sequence
  Synthetic Polynucleotide
ccgcatgctagctccacaagtgg

SEQ ID NO: 1097 - DNA, 23 bp, Artificial Sequence
  Synthetic Polynucleotide
tcaaccgatcaactgcacgttgg

SEQ ID NO: 1098 - DNA, 23 bp, Artificial Sequence
  Synthetic Polynucleotide
tcaagggctgtatagatgcgagg

SEQ ID NO: 1099 - DNA, 23 bp, Artificial Sequence
  Synthetic Polynucleotide
gcgatacccgttgaattccgagg

SEQ ID NO: 1100 - DNA, 23 bp, Artificial Sequence
  Synthetic Polynucleotide
acacttccggcatagagggatgg

SEQ ID NO: 1101 - DNA, 23 bp, Artificial Sequence
  Synthetic Polynucleotide
aagatggacttgtcagcgcacgg

SEQ ID NO: 1102 - DNA, 23 bp, Artificial Sequence
  Synthetic Polynucleotide
cttgacctgttgagccatggcgg

SEQ ID NO: 1103 - DNA, 23 bp, Artificial Sequence
  Synthetic Polynucleotide
aagtaggtgcctgtgaagcccgg

SEQ ID NO: 1104 - DNA, 23 bp, Artificial Sequence
  Synthetic Polynucleotide
acagggataggcaaattccccgg

SEQ ID NO: 1105 - DNA, 23 bp, Artificial Sequence
  Synthetic Polynucleotide
ttaggtcatagctcccgcttagg

SEQ ID NO: 1106 - DNA, 23 bp, Artificial Sequence
  Synthetic Polynucleotide
aaccatggaggaattcactccgg

SEQ ID NO: 1107 - DNA, 23 bp, Artificial Sequence
  Synthetic Polynucleotide
tgaaagggctgtgtgcagtacgg

SEQ ID NO: 1108 - DNA, 23 bp, Artificial Sequence
  Synthetic Polynucleotide
gcatggcctcggaattcaacggg

SEQ ID NO: 1109 - DNA, 23 bp, Artificial Sequence
  Synthetic Polynucleotide
agcatggcctcggaattcaacgg

SEQ ID NO: 1110 - DNA, 23 bp, Artificial Sequence
  Synthetic Polynucleotide
gctgcagggcgctaacagtcagg

SEQ ID NO: 1111 - DNA, 19 bp, Artificial Sequence
  Synthetic Polynucleotide
  misc_feature (1)..(19): n is a, c, g, or t
nnnnnnnnnnnnnnnnnnn

SEQ ID NO: 1112 - DNA, 23 bp, Artificial Sequence
  Synthetic Polynucleotide
tgaagaacccaagctacccgcgg

SEQ ID NO: 1113 - DNA, 23 bp, Artificial Sequence
  Synthetic Polynucleotide
tccaggggcaaaatcgcaggcgg

SEQ ID NO: 1114 - DNA, 23 bp, Artificial Sequence
  Synthetic Polynucleotide
caaggacttcgacttcccggcgg

SEQ ID NO: 1115 - DNA, 23 bp, Artificial Sequence
  Synthetic Polynucleotide
ttgctcctcacgatcaagggggg

SEQ ID NO: 1116 - DNA, 23 bp, Artificial Sequence
  Synthetic Polynucleotide
catgggcatgctctcgacagcgg

SEQ ID NO: 1117 - DNA, 23 bp, Artificial Sequence
  Synthetic Polynucleotide
acagtagaggccactgatggagg

SEQ ID NO: 1118 - DNA, 23 bp, Artificial Sequence
  Synthetic Polynucleotide
ttgatttactccatcaccgaagg

SEQ ID NO: 1119 - DNA, 23 bp, Artificial Sequence
  Synthetic Polynucleotide
tgagatggaaatcctcgctgcgg

SEQ ID NO: 1120 - DNA, 23 bp, Artificial Sequence
  Synthetic Polynucleotide
tgaggttcagacatatcgagggg

SEQ ID NO: 1121 - DNA, 23 bp, Artificial Sequence
  Synthetic Polynucleotide
ctaaccgttagagcttccgatgg

SEQ ID NO: 1122 - DNA, 23 bp, Artificial Sequence
  Synthetic Polynucleotide
taggaggaagcggtgaaccacgg

SEQ ID NO: 1123 - DNA, 23 bp, Artificial Sequence
  Synthetic Polynucleotide
gtattccagaaactctgcgcggg

SEQ ID NO: 1124 - DNA, 23 bp, Artificial Sequence
  Synthetic Polynucleotide
gtggctatgacgtgatagagcgg

SEQ ID NO: 1125 - DNA, 23 bp, Artificial Sequence
  Synthetic Polynucleotide
ttaacagaagagaactggggcgg

SEQ ID NO: 1126 - DNA, 23 bp, Artificial Sequence
  Synthetic Polynucleotide
cttgctcctcacgatcaaggggg

SEQ ID NO: 1127 - DNA, 23 bp, Artificial Sequence
  Synthetic Polynucleotide
accagtatgtgtccacgccgtgg

SEQ ID NO: 1128 - DNA, 23 bp, Artificial Sequence
  Synthetic Polynucleotide
gatgaaccctgtaagaatggcgg

SEQ ID NO: 1129 - DNA, 23 bp, Artificial Sequence
  Synthetic Polynucleotide
tcctagagacatgcctgccgcgg

SEQ ID NO: 1130 - DNA, 23 bp, Artificial Sequence
  Synthetic Polynucleotide
tcggggtgtaggaaataggccgg

SEQ ID NO: 1131 - DNA, 23 bp, Artificial Sequence
  Synthetic Polynucleotide
gatacggactattaccctggagg

SEQ ID NO: 1132 - DNA, 23 bp, Artificial Sequence
  Synthetic Polynucleotide
ggacgacggccacttcgaagagg

SEQ ID NO: 1133 - DNA, 23 bp, Artificial Sequence
  Synthetic Polynucleotide
tcccatacaacttcatgccacgg

SEQ ID NO: 1134 - DNA, 23 bp, Artificial Sequence
  Synthetic Polynucleotide
tagggaaggttgacaaacaccgg

SEQ ID NO: 1135 - DNA, 23 bp, Artificial Sequence
  Synthetic Polynucleotide
ttaaccccgagtctgtgcacggg

SEQ ID NO: 1136 - DNA, 23 bp, Artificial Sequence
  Synthetic Polynucleotide
actggggcttgccgtaccgccgg

SEQ ID NO: 1137 - DNA, 23 bp, Artificial Sequence
  Synthetic Polynucleotide
cacggtgatggcataaggatcgg

SEQ ID NO: 1138 - DNA, 23 bp, Artificial Sequence
  Synthetic Polynucleotide
acacgaatgaccacgccccgtgg

SEQ ID NO: 1139 - DNA, 23 bp, Artificial Sequence
  Synthetic Polynucleotide
catcaccgaaggcaacatcgggg

SEQ ID NO: 1140 - DNA, 23 bp, Artificial Sequence
  Synthetic Polynucleotide
aagtgtctttgataccctggcgg

SEQ ID NO: 1141 - DNA, 23 bp, Artificial Sequence
  Synthetic Polynucleotide
aacagatgggaagttcacgacgg

SEQ ID NO: 1142 - DNA, 23 bp, Artificial Sequence
  Synthetic Polynucleotide
aacgcgcccgtcttctccagggg

SEQ ID NO: 1143 - DNA, 23 bp, Artificial Sequence
  Synthetic Polynucleotide
gttggcaaagcggatcgcgatgg

SEQ ID NO: 1144 - DNA, 23 bp, Artificial Sequence
  Synthetic Polynucleotide
actgagatcactttctccgccgg

SEQ ID NO: 1145 - DNA, 23 bp, Artificial Sequence
  Synthetic Polynucleotide
tttgtgattgacagacagagcgg

SEQ ID NO: 1146 - DNA, 23 bp, Artificial Sequence
  Synthetic Polynucleotide
ttcacggtactcaaacacagggg

SEQ ID NO: 1147 - DNA, 23 bp, Artificial Sequence
  Synthetic Polynucleotide
tatcgcaagagtcagcgccacgg

SEQ ID NO: 1148 - DNA, 23 bp, Artificial Sequence
  Synthetic Polynucleotide
taatgtggaggcgcgaacaaagg

SEQ ID NO: 1149 - DNA, 23 bp, Artificial Sequence
  Synthetic Polynucleotide
ttagtttaaaccccaactcgggg

SEQ ID NO: 1150 - DNA, 23 bp, Artificial Sequence
  Synthetic Polynucleotide
cttactatcacggcaactgatgg

SEQ ID NO: 1151 - DNA, 23 bp, Artificial Sequence
  Synthetic Polynucleotide
gaaatcctcgctgcggaccgtgg

SEQ ID NO: 1152 - DNA, 23 bp, Artificial Sequence
  Synthetic Polynucleotide
ggtgacggtaacatccacaatgg

SEQ ID NO: 1153 - DNA, 23 bp, Artificial Sequence
  Synthetic Polynucleotide
gactatgagagcggggacgacgg

SEQ ID NO: 1154 - DNA, 23 bp, Artificial Sequence
  Synthetic Polynucleotide
gccgtgcgtgttctcacagaggg

SEQ ID NO: 1155 - DNA, 23 bp, Artificial Sequence
  Synthetic Polynucleotide
ataatggcttggcaaacacaggg

SEQ ID NO: 1156 - DNA, 23 bp, Artificial Sequence
  Synthetic Polynucleotide
aattttgacagaggtaaggccgg

SEQ ID NO: 1157 - DNA, 23 bp, Artificial Sequence
  Synthetic Polynucleotide
cggcaggcatgtctctaggaggg

SEQ ID NO: 1158 - DNA, 23 bp, Artificial Sequence
  Synthetic Polynucleotide
tagtttaaaccccaactcggggg

SEQ ID NO: 1159 - DNA, 23 bp, Artificial Sequence
  Synthetic Polynucleotide
tggatggagtcgctgtcagaagg

SEQ ID NO: 1160 - DNA, 23 bp, Artificial Sequence
  Synthetic Polynucleotide
cagtgacatagcgaatgacatgg

SEQ ID NO: 1161 - DNA, 23 bp, Artificial Sequence
  Synthetic Polynucleotide
actggcccggctttgaactgtgg

SEQ ID NO: 1162 - DNA, 17 bp, Artificial Sequence
  Synthetic Polynucleotide
  misc_feature (1)..(17): n is a, c, g, or t
nnnnnnnnnnnnnnnnn

SEQ ID NO: 1163 - DNA, 23 bp, Artificial Sequence
  Synthetic Polynucleotide
ttcctcatcaccgaaagcggcgg

SEQ ID NO: 1164 - DNA, 23 bp, Artificial Sequence
  Synthetic Polynucleotide
tgaggaaaagaaaatggcggcgg

SEQ ID NO: 1165 - DNA, 23 bp, Artificial Sequence
  Synthetic Polynucleotide
atctcacgaacccaaagaggcgg

SEQ ID NO: 1166 - DNA, 23 bp, Artificial Sequence
  Synthetic Polynucleotide
atggcggcgggaaaagcgagcgg

SEQ ID NO: 1167 - DNA, 23 bp, Artificial Sequence
  Synthetic Polynucleotide
gattgtgcacgaaaaacaagcgg

SEQ ID NO: 1168 - DNA, 23 bp, Artificial Sequence
  Synthetic Polynucleotide
ctcatcaccgaaagcggcggcgg

SEQ ID NO: 1169 - DNA, 23 bp, Artificial Sequence
  Synthetic Polynucleotide
aaaagcgagcggcgagagcgagg

SEQ ID NO: 1170 - DNA, 23 bp, Artificial Sequence
  Synthetic Polynucleotide
cttttcctcatcaccgaaagcgg

SEQ ID NO: 1171 - DNA, 23 bp, Artificial Sequence
  Synthetic Polynucleotide
tgcgtttccatgaaatcctgcgg

SEQ ID NO: 1172 - DNA, 23 bp, Artificial Sequence
  Synthetic Polynucleotide
tcggcggactggacaggtacggg

SEQ ID NO: 1173 - DNA, 23 bp, Artificial Sequence
  Synthetic Polynucleotide
aaggtaaggcagctgcgagtcgg

SEQ ID NO: 1174 - DNA, 23 bp, Artificial Sequence
  Synthetic Polynucleotide
tgacggtgcctgaaacaagcagg

SEQ ID NO: 1175 - DNA, 23 bp, Artificial Sequence
  Synthetic Polynucleotide
ctcacgtaaatactaggtgtagg

SEQ ID NO: 1176 - DNA, 23 bp, Artificial Sequence
  Synthetic Polynucleotide
tctttgtatgaacagctgggtgg

SEQ ID NO: 1177 - DNA, 23 bp, Artificial Sequence
  Synthetic Polynucleotide
gccttcaggaaacatattgacgg

SEQ ID NO: 1178 - DNA, 23 bp, Artificial Sequence
  Synthetic Polynucleotide
cgatctactggaattcctaatgg

SEQ ID NO: 1179 - DNA, 23 bp, Artificial Sequence
  Synthetic Polynucleotide
ctcggcggactggacaggtacgg

SEQ ID NO: 1180 - DNA, 23 bp, Artificial Sequence
  Synthetic Polynucleotide
cgtacctgtgcaactcctgttgg

SEQ ID NO: 1181 - DNA, 23 bp, Artificial Sequence
  Synthetic Polynucleotide
cgccgccgctttcggtgatgagg

SEQ ID NO: 1182 - DNA, 23 bp, Artificial Sequence
  Synthetic Polynucleotide
cgccaggacgaaggccctactgg

SEQ ID NO: 1183 - DNA, 23 bp, Artificial Sequence
  Synthetic Polynucleotide
tcacattcggcaggtcctaatgg

SEQ ID NO: 1184 - DNA, 23 bp, Artificial Sequence
  Synthetic Polynucleotide
tcgacactggcagtgctgttagg

SEQ ID NO: 1185 - DNA, 23 bp, Artificial Sequence
  Synthetic Polynucleotide
ggaacaatatcaagatgaggcgg

SEQ ID NO: 1186 - DNA, 23 bp, Artificial Sequence
  Synthetic Polynucleotide
gaagacaatacctattgtggggg

SEQ ID NO: 1187 - DNA, 23 bp, Artificial Sequence
  Synthetic Polynucleotide
cgctgaataaacctatacactgg

SEQ ID NO: 1188 - DNA, 23 bp, Artificial Sequence
  Synthetic Polynucleotide
ctgtagcacatcaagaacgctgg

SEQ ID NO: 1189 - DNA, 23 bp, Artificial Sequence
  Synthetic Polynucleotide
agtcctggtatttcctcggaagg

SEQ ID NO: 1190 - DNA, 23 bp, Artificial Sequence
  Synthetic Polynucleotide
accgtcaatatgtttcctgaagg

SEQ ID NO: 1191 - DNA, 23 bp, Artificial Sequence
  Synthetic Polynucleotide
acttgaatagcacctgagaaggg

SEQ ID NO: 1192 - DNA, 23 bp, Artificial Sequence
  Synthetic Polynucleotide
gatttcatgaagatggcgccagg

SEQ ID NO: 1193 - DNA, 23 bp, Artificial Sequence
  Synthetic Polynucleotide
ctggtaagtctcaccttccgagg

SEQ ID NO: 1194 - DNA, 23 bp, Artificial Sequence
  Synthetic Polynucleotide
agtgcgtttcgctgcaggtaagg

SEQ ID NO: 1195 - DNA, 23 bp, Artificial Sequence
  Synthetic Polynucleotide
tgtagcacatcaagaacgctggg

SEQ ID NO: 1196 - DNA, 23 bp, Artificial Sequence
  Synthetic Polynucleotide
ccaactatctaactccactcagg

SEQ ID NO: 1197 - DNA, 23 bp, Artificial Sequence
  Synthetic Polynucleotide
gatggtatgatctgtggactagg

SEQ ID NO: 1198 - DNA, 23 bp, Artificial Sequence
  Synthetic Polynucleotide
gagagaggtcgttcaccattagg

SEQ ID NO: 1199 - DNA, 23 bp, Artificial Sequence
  Synthetic Polynucleotide
ggccagtcctggtatttcctcgg

SEQ ID NO: 1200 - DNA, 23 bp, Artificial Sequence
  Synthetic Polynucleotide
cgctgctggtcaggtttgtgcgg

SEQ ID NO: 1201 - DNA, 23 bp, Artificial Sequence
  Synthetic Polynucleotide
gtcaggtttgtgcggttatgagg

SEQ ID NO: 1202 - DNA, 23 bp, Artificial Sequence
  Synthetic Polynucleotide
taatcatgtccatcagatgacgg

SEQ ID NO: 1203 - DNA, 23 bp, Artificial Sequence
  Synthetic Polynucleotide
ttagatagttggtttttccacgg

SEQ ID NO: 1204 - DNA, 23 bp, Artificial Sequence
  Synthetic Polynucleotide
attactgtaacagggttgttcgg

SEQ ID NO: 1205 - DNA, 23 bp, Artificial Sequence
  Synthetic Polynucleotide
ggtagcgagcgacactccgcagg

SEQ ID NO: 1206 - DNA, 23 bp, Artificial Sequence
  Synthetic Polynucleotide
gttgcacaggtacgatctactgg

SEQ ID NO: 1207 - DNA, 23 bp, Artificial Sequence
  Synthetic Polynucleotide
gatgaggcggatggtaatggagg

SEQ ID NO: 1208 - DNA, 23 bp, Artificial Sequence
  Synthetic Polynucleotide
aattcgtgctgcaagtgcagagg

SEQ ID NO: 1209 - DNA, 23 bp, Artificial Sequence
  Synthetic Polynucleotide
gatacgacacgcacaaaagcagg

SEQ ID NO: 1210 - DNA, 23 bp, Artificial Sequence
  Synthetic Polynucleotide
acttctgacaattggagtggtgg

SEQ ID NO: 1211 - DNA, 23 bp, Artificial Sequence
  Synthetic Polynucleotide
tctcctcggctgtcaggctgggg

SEQ ID NO: 1212 - DNA, 23 bp, Artificial Sequence
  Synthetic Polynucleotide
ttgtgtgtagcccactgtgaggg

SEQ ID NO: 1213 - DNA, 20 bp, Artificial Sequence
  Synthetic Polynucleotide
  misc_feature (1)..(20): n is a, c, g, or t
nnnnnnnnnnnnnnnnnnnn

SEQ ID NO: 1214 - DNA, 23 bp, Artificial Sequence
  Synthetic Polynucleotide
tcacatccaatagtagcaccagg

SEQ ID NO: 1215 - DNA, 23 bp, Artificial Sequence
  Synthetic Polynucleotide
atacgagagaaaccttcacaagg

SEQ ID NO: 1216 - DNA, 23 bp, Artificial Sequence
  Synthetic Polynucleotide
ggcagcgcaccataagtgcatgg

SEQ ID NO: 1217 - DNA, 23 bp, Artificial Sequence
  Synthetic Polynucleotide
gtggctaaatgatgtaccttcgg

SEQ ID NO: 1218 - DNA, 23 bp, Artificial Sequence
  Synthetic Polynucleotide
gaacgagagagtaaaagccgagg

SEQ ID NO: 1219 - DNA, 23 bp, Artificial Sequence
  Synthetic Polynucleotide
gtacttcaggagattaaacgagg

SEQ ID NO: 1220 - DNA, 23 bp, Artificial Sequence
  Synthetic Polynucleotide
atttaggcctggtgtcactaggg

SEQ ID NO: 1221 - DNA, 23 bp, Artificial Sequence
  Synthetic Polynucleotide
agtgacaccaggcctaaatgtgg

SEQ ID NO: 1222 - DNA, 23 bp, Artificial Sequence
  Synthetic Polynucleotide
catgcaatgcacagtggtagtgg

SEQ ID NO: 1223 - DNA, 23 bp, Artificial Sequence
  Synthetic Polynucleotide
cctacaagacagcgcaaatgtgg

SEQ ID NO: 1224 - DNA, 23 bp, Artificial Sequence
  Synthetic Polynucleotide
aagggctgtcagaagataccagg

SEQ ID NO: 1225 - DNA, 23 bp, Artificial Sequence
  Synthetic Polynucleotide
catttaggcctggtgtcactagg

SEQ ID NO: 1226 - DNA, 23 bp, Artificial Sequence
  Synthetic Polynucleotide
agtcagcctggtgctactattgg

SEQ ID NO: 1227 - DNA, 23 bp, Artificial Sequence
  Synthetic Polynucleotide
taagtgcatggtaagtataccgg

SEQ ID NO: 1228 - DNA, 23 bp, Artificial Sequence
  Synthetic Polynucleotide
gcttaccatgcacttataatggg

SEQ ID NO: 1229 - DNA, 23 bp, Artificial Sequence
  Synthetic Polynucleotide
gtatacttaccatgcacttatgg

SEQ ID NO: 1230 - DNA, 23 bp, Artificial Sequence
  Synthetic Polynucleotide
aagacttaccattaccactgtgg

SEQ ID NO: 1231 - DNA, 23 bp, Artificial Sequence
  Synthetic Polynucleotide
cattgtcctggagcaacaattgg

SEQ ID NO: 1232 - DNA, 23 bp, Artificial Sequence
  Synthetic Polynucleotide
gcagcaacttaatggaaactagg

SEQ ID NO: 1233 - DNA, 23 bp, Artificial Sequence
  Synthetic Polynucleotide
gaggcacgaagctggtaagttgg

SEQ ID NO: 1234 - DNA, 23 bp, Artificial Sequence
  Synthetic Polynucleotide
agctgcccattataagtgcatgg

SEQ ID NO: 1235 - DNA, 23 bp, Artificial Sequence
  Synthetic Polynucleotide
gtaatggtaagtcttaacacagg

SEQ ID NO: 1236 - DNA, 23 bp, Artificial Sequence
  Synthetic Polynucleotide
gatcaatttctacttttcctcgg

SEQ ID NO: 1237 - DNA, 23 bp, Artificial Sequence
  Synthetic Polynucleotide
gtgcagttttcttgtgttttcgg

SEQ ID NO: 1238 - DNA, 23 bp, Artificial Sequence
  Synthetic Polynucleotide
aaaactgcacataactccgaagg

SEQ ID NO: 1239 - DNA, 23 bp, Artificial Sequence
  Synthetic Polynucleotide
ctcccatggaacagatgaaatgg

SEQ ID NO: 1240 - DNA, 23 bp, Artificial Sequence
  Synthetic Polynucleotide
tcacaaccaattgttgctccagg

SEQ ID NO: 1241 - DNA, 23 bp, Artificial Sequence
  Synthetic Polynucleotide
ctaactcagcagcaacttaatgg

SEQ ID NO: 1242 - DNA, 23 bp, Artificial Sequence
  Synthetic Polynucleotide
tacattgaaaatatgtcacgagg

SEQ ID NO: 1243 - DNA, 23 bp, Artificial Sequence
  Synthetic Polynucleotide
tgtacactttgcagtcagcctgg

SEQ ID NO: 1244 - DNA, 23 bp, Artificial Sequence
  Synthetic Polynucleotide
atgtggattttgccatgtagggg

SEQ ID NO: 1245 - DNA, 23 bp, Artificial Sequence
  Synthetic Polynucleotide
caattgttgctccaggacaatgg

SEQ ID NO: 1246 - DNA, 23 bp, Artificial Sequence
  Synthetic Polynucleotide
atctgttccatgggaggatgtgg

SEQ ID NO: 1247 - DNA, 23 bp, Artificial Sequence
  Synthetic Polynucleotide
tatggtgcgctgccaccttctgg

SEQ ID NO: 1248 - DNA, 23 bp, Artificial Sequence
  Synthetic Polynucleotide
ttataagtgcatggtaagcatgg

SEQ ID NO: 1249 - DNA, 23 bp, Artificial Sequence
  Synthetic Polynucleotide
tccatgggaggatgtggacctgg

SEQ ID NO: 1250 - DNA, 23 bp, Artificial Sequence
  Synthetic Polynucleotide
ctttgtcttgtactccacagtgg

SEQ ID NO: 1251 - DNA, 23 bp, Artificial Sequence
  Synthetic Polynucleotide
catttcatctgttccatgggagg

SEQ ID NO: 1252 - DNA, 23 bp, Artificial Sequence
  Synthetic Polynucleotide
ataatgggcagctgccttcttgg

SEQ ID NO: 1253 - DNA, 23 bp, Artificial Sequence
  Synthetic Polynucleotide
ttccatttcatctgttccatggg

SEQ ID NO: 1254 - DNA, 23 bp, Artificial Sequence
  Synthetic Polynucleotide
cttgtactccacagtggtaatgg

SEQ ID NO: 1255 - DNA, 23 bp, Artificial Sequence
  Synthetic Polynucleotide
accaggtccacatcctcccatgg

SEQ ID NO: 1256 - DNA, 23 bp, Artificial Sequence
  Synthetic Polynucleotide
ttctattgaagatgtccaaaagg

SEQ ID NO: 1257 - DNA, 23 bp, Artificial Sequence
  Synthetic Polynucleotide
gcaaaatccacatttaggcctgg

SEQ ID NO: 1258 - DNA, 23 bp, Artificial Sequence
  Synthetic Polynucleotide
ctcttgatgttgttgtgagctgg

SEQ ID NO: 1259 - DNA, 23 bp, Artificial Sequence
  Synthetic Polynucleotide
cactctgataatgaaagtcttgg

SEQ ID NO: 1260 - DNA, 23 bp, Artificial Sequence
  Synthetic Polynucleotide
tgcttaccatgcacttataatgg

SEQ ID NO: 1261 - DNA, 23 bp, Artificial Sequence
  Synthetic Polynucleotide
gaagcagccctagtgacaccagg

SEQ ID NO: 1262 - DNA, 23 bp, Artificial Sequence
  Synthetic Polynucleotide
tcaaatagagacaaggaatgtgg

SEQ ID NO: 1263 - DNA, 23 bp, Artificial Sequence
  Synthetic Polynucleotide
gtgatgtgaaaacatgtcacagg

SEQ ID NO: 1264 - DNA, 19 bp, Artificial Sequence
  Synthetic Polynucleotide
  misc_feature (1)..(19): n is a, c, g, or t
nnnnnnnnnnnnnnnnnnn

SEQ ID NO: 1265 - DNA, 23 bp, Artificial Sequence
  Synthetic Polynucleotide
aagggtatccgccaacacagagg

SEQ ID NO: 1266 - DNA, 23 bp, Artificial Sequence
  Synthetic Polynucleotide
tacaaggtctctacaacggaagg

SEQ ID NO: 1267 - DNA, 23 bp, Artificial Sequence
  Synthetic Polynucleotide
cgccgttttcgttttgatggagg

SEQ ID NO: 1268 - DNA, 23 bp, Artificial Sequence
  Synthetic Polynucleotide
tacacctagccacacaccagcgg

SEQ ID NO: 1269 - DNA, 23 bp, Artificial Sequence
  Synthetic Polynucleotide
atagcggttcaatgaccacgagg

SEQ ID NO: 1270 - DNA, 23 bp, Artificial Sequence
  Synthetic Polynucleotide
actcctcgaacagatcgaggtgg

SEQ ID NO: 1271 - DNA, 23 bp, Artificial Sequence
  Synthetic Polynucleotide
catcaaaacgaaaacggcgttgg

SEQ ID NO: 1272 - DNA, 23 bp, Artificial Sequence
  Synthetic Polynucleotide
gtctcatcccatcttaaggaagg

SEQ ID NO: 1273 - DNA, 23 bp, Artificial Sequence
  Synthetic Polynucleotide
gctgatgtctcctacacttgagg

SEQ ID NO: 1274 - DNA, 23 bp, Artificial Sequence
  Synthetic Polynucleotide
aatctgacgcaatgcagcctggg

SEQ ID NO: 1275 - DNA, 23 bp, Artificial Sequence
  Synthetic Polynucleotide
acacctagccacacaccagcggg

SEQ ID NO: 1276 - DNA, 23 bp, Artificial Sequence
  Synthetic Polynucleotide
ggagaactaaaagtcgtcaatgg

SEQ ID NO: 1277 - DNA, 23 bp, Artificial Sequence
  Synthetic Polynucleotide
gtgtgttcgagtggacaaaatgg

SEQ ID NO: 1278 - DNA, 23 bp, Artificial Sequence
  Synthetic Polynucleotide
tttcgagctggagttcgaatagg

SEQ ID NO: 1279 - DNA, 23 bp, Artificial Sequence
  Synthetic Polynucleotide
cgctcttgatcctcaagtgtagg

SEQ ID NO: 1280 - DNA, 23 bp, Artificial Sequence
  Synthetic Polynucleotide
tctccacctcgatctgttcgagg

SEQ ID NO: 1281 - DNA, 23 bp, Artificial Sequence
  Synthetic Polynucleotide
tagcagctcccgctggtgtgtgg

SEQ ID NO: 1282 - DNA, 23 bp, Artificial Sequence
  Synthetic Polynucleotide
ggcatactccttccttaagatgg

SEQ ID NO: 1283 - DNA, 23 bp, Artificial Sequence
  Synthetic Polynucleotide
gatcgaggtggagattctattgg

SEQ ID NO: 1284 - DNA, 23 bp, Artificial Sequence
  Synthetic Polynucleotide
agggtctgtttcacccagcccgg

SEQ ID NO: 1285 - DNA, 23 bp, Artificial Sequence
  Synthetic Polynucleotide
tcagtaatgttgaacggctttgg

SEQ ID NO: 1286 - DNA, 23 bp, Artificial Sequence
  Synthetic Polynucleotide
ggagtgggcctcgattctacagg

SEQ ID NO: 1287 - DNA, 23 bp, Artificial Sequence
  Synthetic Polynucleotide
ttacctttcctctgtgttggcgg

SEQ ID NO: 1288 - DNA, 23 bp, Artificial Sequence
  Synthetic Polynucleotide
atcaaaacgaaaacggcgttggg

SEQ ID NO: 1289 - DNA, 23 bp, Artificial Sequence
  Synthetic Polynucleotide
aaccccaggctcaaaaatatggg

SEQ ID NO: 1290 - DNA, 23 bp, Artificial Sequence
  Synthetic Polynucleotide
cgccaagcctgaagctgttcagg

SEQ ID NO: 1291 - DNA, 23 bp, Artificial Sequence
  Synthetic Polynucleotide
aagctctagctgttgtgttacgg

SEQ ID NO: 1292 - DNA, 23 bp, Artificial Sequence
  Synthetic Polynucleotide
ctctacgaatagcctttttgtgg

SEQ ID NO: 1293 - DNA, 23 bp, Artificial Sequence
  Synthetic Polynucleotide
aagatcgccaagactcacgaagg

SEQ ID NO: 1294 - DNA, 23 bp, Artificial Sequence
  Synthetic Polynucleotide
agaccttgtacacagacagacgg

SEQ ID NO: 1295 - DNA, 23 bp, Artificial Sequence
  Synthetic Polynucleotide
tgagacaccaggtcgtgcaaagg

SEQ ID NO: 1296 - DNA, 23 bp, Artificial Sequence
  Synthetic Polynucleotide
atcattaagcaatgccacagggg

SEQ ID NO: 1297 - DNA, 23 bp, Artificial Sequence
  Synthetic Polynucleotide
tgtcatgaagacttgtcaagagg

SEQ ID NO: 1298 - DNA, 23 bp, Artificial Sequence
  Synthetic Polynucleotide
gagactcctcgaacagatcgagg

SEQ ID NO: 1299 - DNA, 23 bp, Artificial Sequence
  Synthetic Polynucleotide
acaccagctagtcagatgggtgg

SEQ ID NO: 1300 - DNA, 23 bp, Artificial Sequence
  Synthetic Polynucleotide
acaaggtctctacaacggaaggg

SEQ ID NO: 1301 - DNA, 23 bp, Artificial Sequence
  Synthetic Polynucleotide
tcccggtctgcaatctttggagg

SEQ ID NO: 1302 - DNA, 23 bp, Artificial Sequence
  Synthetic Polynucleotide
gctactccaacacctttgggtgg

SEQ ID NO: 1303 - DNA, 23 bp, Artificial Sequence
  Synthetic Polynucleotide
acagagagaggtacttctagtgg

SEQ ID NO: 1304 - DNA, 23 bp, Artificial Sequence
  Synthetic Polynucleotide
aaagctcgtgaatttggagctgg

SEQ ID NO: 1305 - DNA, 23 bp, Artificial Sequence
  Synthetic Polynucleotide
gaagttgcgcctccatggcctgg

SEQ ID NO: 1306 - DNA, 23 bp, Artificial Sequence
  Synthetic Polynucleotide
tggcggatacccttccataaagg

SEQ ID NO: 1307 - DNA, 23 bp, Artificial Sequence
  Synthetic Polynucleotide
attggtgaaacaccgactcctgg

SEQ ID NO: 1308 - DNA, 23 bp, Artificial Sequence
  Synthetic Polynucleotide
cttttactggctccaggagtcgg

SEQ ID NO: 1309 - DNA, 23 bp, Artificial Sequence
  Synthetic Polynucleotide
cagtgctcgtaaaaacagatggg

SEQ ID NO: 1310 - DNA, 23 bp, Artificial Sequence
  Synthetic Polynucleotide
gacctccaaagattgcagaccgg

SEQ ID NO: 1311 - DNA, 23 bp, Artificial Sequence
  Synthetic Polynucleotide
agcctccatcaaaacgaaaacgg

SEQ ID NO: 1312 - DNA, 23 bp, Artificial Sequence
  Synthetic Polynucleotide
gctcccgctggtgtgtggctagg

SEQ ID NO: 1313 - DNA, 23 bp, Artificial Sequence
  Synthetic Polynucleotide
ccatctgtttttacgagcactgg

SEQ ID NO: 1314 - DNA, 23 bp, Artificial Sequence
  Synthetic Polynucleotide
taatctgacgcaatgcagcctgg

SEQ ID NO: 1315 - DNA, 17 bp, Artificial Sequence
  Synthetic Polynucleotide
  misc_feature (1)..(17): n is a, c, g, or t
nnnnnnnnnnnnnnnnn

SEQ ID NO: 1316 - DNA, 23 bp, Artificial Sequence
  Synthetic Polynucleotide
aagaagagttacctcagcggcgg

SEQ ID NO: 1317 - DNA, 23 bp, Artificial Sequence
  Synthetic Polynucleotide
gtcgggtcgtcggtgaccagcgg

SEQ ID NO: 1318 - DNA, 23 bp, Artificial Sequence
  Synthetic Polynucleotide
aacgctggtcaccgtggcggcgg

SEQ ID NO: 1319 - DNA, 23 bp, Artificial Sequence
  Synthetic Polynucleotide
tgtggtcctcaggtgagcgccgg

SEQ ID NO: 1320 - DNA, 23 bp, Artificial Sequence
  Synthetic Polynucleotide
gatgtagagggtgtcgcccgagg

SEQ ID NO: 1321 - DNA, 23 bp, Artificial Sequence
  Synthetic Polynucleotide
acaaacgctggtcaccgtggcgg

SEQ ID NO: 1322 - DNA, 23 bp, Artificial Sequence
  Synthetic Polynucleotide
agaagagttacctcagcggcggg

SEQ ID NO: 1323 - DNA, 23 bp, Artificial Sequence
  Synthetic Polynucleotide
tgccgccgcccttcttgacgcgg

SEQ ID NO: 1324 - DNA, 23 bp, Artificial Sequence
  Synthetic Polynucleotide
ggcaagaagagttacctcagcgg

SEQ ID NO: 1325 - DNA, 23 bp, Artificial Sequence
  Synthetic Polynucleotide
catgatcgctctgcagccgctgg

SEQ ID NO: 1326 - DNA, 23 bp, Artificial Sequence
  Synthetic Polynucleotide
agttacctcagcggcggggccgg

SEQ ID NO: 1327 - DNA, 23 bp, Artificial Sequence
  Synthetic Polynucleotide
ccttgacagtgcacgttcgaagg

SEQ ID NO: 1328 - DNA, 23 bp, Artificial Sequence
  Synthetic Polynucleotide
cgacaccctctacatcgccacgg

SEQ ID NO: 1329 - DNA, 23 bp, Artificial Sequence
  Synthetic Polynucleotide
accctctacatcgccacggacgg

SEQ ID NO: 1330 - DNA, 23 bp, Artificial Sequence
  Synthetic Polynucleotide
agcggctgcagagcgatcatggg

SEQ ID NO: 1331 - DNA, 23 bp, Artificial Sequence
  Synthetic Polynucleotide
gtggtctcgatggtctccaccgg

SEQ ID NO: 1332 - DNA, 23 bp, Artificial Sequence
  Synthetic Polynucleotide
gccgtccgtggcgatgtagaggg

SEQ ID NO: 1333 - DNA, 23 bp, Artificial Sequence
  Synthetic Polynucleotide
cacggacggctcggagatgccgg

SEQ ID NO: 1334 - DNA, 23 bp, Artificial Sequence
  Synthetic Polynucleotide
cgaggatcagattctcatcccgg

SEQ ID NO: 1335 - DNA, 23 bp, Artificial Sequence
  Synthetic Polynucleotide
ctacatcgccacggacggctcgg

SEQ ID NO: 1336 - DNA, 23 bp, Artificial Sequence
  Synthetic Polynucleotide
tgctcccacttcttgttgcccgg

SEQ ID NO: 1337 - DNA, 23 bp, Artificial Sequence
  Synthetic Polynucleotide
gaagagttacctcagcggcgggg

SEQ ID NO: 1338 - DNA, 23 bp, Artificial Sequence
  Synthetic Polynucleotide
ccgacccgggcaacaagaagtgg

SEQ ID NO: 1339 - DNA, 23 bp, Artificial Sequence
  Synthetic Polynucleotide
ggaggcggccgcgtcaagaaggg

SEQ ID NO: 1340 - DNA, 23 bp, Artificial Sequence
  Synthetic Polynucleotide
gctgcagagcgatcatgggcggg

SEQ ID NO: 1341 - DNA, 23 bp, Artificial Sequence
  Synthetic Polynucleotide
cgactacattgaacaaacgctgg

SEQ ID NO: 1342 - DNA, 23 bp, Artificial Sequence
  Synthetic Polynucleotide
cgtggagctgcacgagatcgagg

SEQ ID NO: 1343 - DNA, 23 bp, Artificial Sequence
  Synthetic Polynucleotide
gcagagcgatcatgggcgggtgg

SEQ ID NO: 1344 - DNA, 23 bp, Artificial Sequence
  Synthetic Polynucleotide
ggctgcagagcgatcatgggcgg

SEQ ID NO: 1345 - DNA, 23 bp, Artificial Sequence
  Synthetic Polynucleotide
gatcctggtgcagacgcgcgagg

SEQ ID NO: 1346 - DNA, 23 bp, Artificial Sequence
  Synthetic Polynucleotide
gacgtggactctgggaccgtggg

SEQ ID NO: 1347 - DNA, 23 bp, Artificial Sequence
  Synthetic Polynucleotide
agccgtccgtggcgatgtagagg

SEQ ID NO: 1348 - DNA, 23 bp, Artificial Sequence
  Synthetic Polynucleotide
ctcgatggtctccaccgggatgg

SEQ ID NO: 1349 - DNA, 23 bp, Artificial Sequence
  Synthetic Polynucleotide
gcgagttctcggtcaccatgtgg

SEQ ID NO: 1350 - DNA, 23 bp, Artificial Sequence
  Synthetic Polynucleotide
tggtctcgatggtctccaccggg

SEQ ID NO: 1351 - DNA, 23 bp, Artificial Sequence
  Synthetic Polynucleotide
gggctgcacaaagatgttcaggg

SEQ ID NO: 1352 - DNA, 23 bp, Artificial Sequence
  Synthetic Polynucleotide
gcgctcacctgaggaccacatgg

SEQ ID NO: 1353 - DNA, 23 bp, Artificial Sequence
  Synthetic Polynucleotide
gtgcacctgggtcgggtcgtcgg

SEQ ID NO: 1354 - DNA, 23 bp, Artificial Sequence
  Synthetic Polynucleotide
ggctcgtcgtcgtcgggaggcgg

SEQ ID NO: 1355 - DNA, 23 bp, Artificial Sequence
  Synthetic Polynucleotide
ggcggccgcgtcaagaagggcgg

SEQ ID NO: 1356 - DNA, 23 bp, Artificial Sequence
  Synthetic Polynucleotide
ggcggctcgtcgtcgtcgggagg

SEQ ID NO: 1357 - DNA, 23 bp, Artificial Sequence
  Synthetic Polynucleotide
gggggcggccacgggcacgccgg

SEQ ID NO: 1358 - DNA, 23 bp, Artificial Sequence
  Synthetic Polynucleotide
tgggcggcgacgactcggacggg

SEQ ID NO: 1359 - DNA, 23 bp, Artificial Sequence
  Synthetic Polynucleotide
gtgggcggcgacgactcggacgg

SEQ ID NO: 1360 - DNA, 23 bp, Artificial Sequence
  Synthetic Polynucleotide
tagtcgtcgtcgccgccggccgg

SEQ ID NO: 1361 - DNA, 23 bp, Artificial Sequence
  Synthetic Polynucleotide
ggtcaccgacgacccgacccagg

SEQ ID NO: 1362 - DNA, 23 bp, Artificial Sequence
  Synthetic Polynucleotide
gggaggcggccgcgtcaagaagg

SEQ ID NO: 1363 - DNA, 23 bp, Artificial Sequence
  Synthetic Polynucleotide
ggtggtgggcggcgacgactcgg

SEQ ID NO: 1364 - DNA, 23 bp, Artificial Sequence
  Synthetic Polynucleotide
gcgcgccgaggacggcttcgagg

SEQ ID NO: 1365 - DNA, 23 bp, Artificial Sequence
  Synthetic Polynucleotide
aatgtagtcgtcgtcgccgccgg

SEQ ID NO: 1366 - DNA, 17 bp, Artificial Sequence
  Synthetic Polynucleotide
  misc_feature (1)..(17): n is a, c, g, or t
nnnnnnnnnnnnnnnnn

SEQ ID NO: 1367 - DNA, 23 bp, Artificial Sequence
  Synthetic Polynucleotide
atcgtaagtcggctggcccgggg

SEQ ID NO: 1368 - DNA, 23 bp, Artificial Sequence
  Synthetic Polynucleotide
ttccagaacgcctgccgcgacgg

SEQ ID NO: 1369 - DNA, 23 bp, Artificial Sequence
  Synthetic Polynucleotide
gccgacttacgatttccgagcgg

SEQ ID NO: 1370 - DNA, 23 bp, Artificial Sequence
  Synthetic Polynucleotide
cgatttccgagcggccgtcgcgg

SEQ ID NO: 1371 - DNA, 23 bp, Artificial Sequence
  Synthetic Polynucleotide
gccgctcggaaatcgtaagtcgg

SEQ ID NO: 1372 - DNA, 23 bp, Artificial Sequence
  Synthetic Polynucleotide
agtacacgggcttcagggaccgg

SEQ ID NO: 1373 - DNA, 23 bp, Artificial Sequence
  Synthetic Polynucleotide
aatcgtaagtcggctggcccggg

SEQ ID NO: 1374 - DNA, 23 bp, Artificial Sequence
  Synthetic Polynucleotide
acttaatctgcaaggcaagacgg

SEQ ID NO: 1375 - DNA, 23 bp, Artificial Sequence
  Synthetic Polynucleotide
agcgtgcctggcgttcctcgtgg

SEQ ID NO: 1376 - DNA, 23 bp, Artificial Sequence
  Synthetic Polynucleotide
ctcggaaatcgtaagtcggctgg

SEQ ID NO: 1377 - DNA, 23 bp, Artificial Sequence
  Synthetic Polynucleotide
gcgtgcctggcgttcctcgtggg

SEQ ID NO: 1378 - DNA, 23 bp, Artificial Sequence
  Synthetic Polynucleotide
aagtcgacatactctcggctagg

SEQ ID NO: 1379 - DNA, 23 bp, Artificial Sequence
  Synthetic Polynucleotide
ggaggatgcattagcacaacagg

SEQ ID NO: 1380 - DNA, 23 bp, Artificial Sequence
  Synthetic Polynucleotide
agatagagacaggtctcatcggg

SEQ ID NO: 1381 - DNA, 23 bp, Artificial Sequence
  Synthetic Polynucleotide
gcccgtgtacttaatctgcaagg

SEQ ID NO: 1382 - DNA, 23 bp, Artificial Sequence
  Synthetic Polynucleotide
tgccttgcagattaagtacacgg

SEQ ID NO: 1383 - DNA, 23 bp, Artificial Sequence
  Synthetic Polynucleotide
aagatagagacaggtctcatcgg

SEQ ID NO: 1384 - DNA, 23 bp, Artificial Sequence
  Synthetic Polynucleotide
aaatcgtaagtcggctggcccgg

SEQ ID NO: 1385 - DNA, 23 bp, Artificial Sequence
  Synthetic Polynucleotide
cgagtgtgaggtgaggcaggcgg

SEQ ID NO: 1386 - DNA, 23 bp, Artificial Sequence
  Synthetic Polynucleotide
cctttgaagaggctcggagaagg

SEQ ID NO: 1387 - DNA, 23 bp, Artificial Sequence
  Synthetic Polynucleotide
tagagacaggtctcatcgggagg

SEQ ID NO: 1388 - DNA, 23 bp, Artificial Sequence
  Synthetic Polynucleotide
gccttgcagattaagtacacggg

SEQ ID NO: 1389 - DNA, 23 bp, Artificial Sequence
  Synthetic Polynucleotide
aacaggcctttgaagaggctcgg

SEQ ID NO: 1390 - DNA, 23 bp, Artificial Sequence
  Synthetic Polynucleotide
tcgaacttgcttctctggtcggg

SEQ ID NO: 1391 - DNA, 23 bp, Artificial Sequence
  Synthetic Polynucleotide
ctcgaacttgcttctctggtcgg

SEQ ID NO: 1392 - DNA, 23 bp, Artificial Sequence
  Synthetic Polynucleotide
aggcgttctggaagcgtgcctgg

SEQ ID NO: 1393 - DNA, 23 bp, Artificial Sequence
  Synthetic Polynucleotide
cgttctcgaacttgcttctctgg

SEQ ID NO: 1394 - DNA, 23 bp, Artificial Sequence
  Synthetic Polynucleotide
agcccataccatccagtctttgg

SEQ ID NO: 1395 - DNA, 23 bp, Artificial Sequence
  Synthetic Polynucleotide
tcgagaacgaggagttttttagg

SEQ ID NO: 1396 - DNA, 23 bp, Artificial Sequence
  Synthetic Polynucleotide
actggatggtatgggctgtctgg

SEQ ID NO: 1397 - DNA, 23 bp, Artificial Sequence
  Synthetic Polynucleotide
ctctggtcgggcacgacgcgcgg

SEQ ID NO: 1398 - DNA, 23 bp, Artificial Sequence
  Synthetic Polynucleotide
cttcagggaccggccccacgagg

SEQ ID NO: 1399 - DNA, 23 bp, Artificial Sequence
  Synthetic Polynucleotide
cgcggcatcttcccgccctgagg

SEQ ID NO: 1400 - DNA, 23 bp, Artificial Sequence
  Synthetic Polynucleotide
tttctaagtcgacatactctcgg

SEQ ID NO: 1401 - DNA, 23 bp, Artificial Sequence
  Synthetic Polynucleotide
ggccgtcgcggcaggcgttctgg

SEQ ID NO: 1402 - DNA, 23 bp, Artificial Sequence
  Synthetic Polynucleotide
gtttgatgaggagcgagcccagg

SEQ ID NO: 1403 - DNA, 23 bp, Artificial Sequence
  Synthetic Polynucleotide
cgtgcctggcgttcctcgtgggg

SEQ ID NO: 1404 - DNA, 23 bp, Artificial Sequence
  Synthetic Polynucleotide
caggtctcatcgggaggaaatgg

SEQ ID NO: 1405 - DNA, 23 bp, Artificial Sequence
  Synthetic Polynucleotide
gattaagtacacgggcttcaggg

SEQ ID NO: 1406 - DNA, 23 bp, Artificial Sequence
  Synthetic Polynucleotide
agattaagtacacgggcttcagg

SEQ ID NO: 1407 - DNA, 23 bp, Artificial Sequence
  Synthetic Polynucleotide
aagcctgatgttaccctacctgg

SEQ ID NO: 1408 - DNA, 23 bp, Artificial Sequence
  Synthetic Polynucleotide
ttccgagcggccgtcgcggcagg

SEQ ID NO: 1409 - DNA, 23 bp, Artificial Sequence
  Synthetic Polynucleotide
tgtgaggtgaggcaggcgggcgg

SEQ ID NO: 1410 - DNA, 23 bp, Artificial Sequence
  Synthetic Polynucleotide
ccgcgagtgtgaggtgaggcagg

SEQ ID NO: 1411 - DNA, 23 bp, Artificial Sequence
  Synthetic Polynucleotide
taaaaggcttttgtggccacagg

SEQ ID NO: 1412 - DNA, 23 bp, Artificial Sequence
  Synthetic Polynucleotide
agcctgatgttaccctacctggg

SEQ ID NO: 1413 - DNA, 23 bp, Artificial Sequence
  Synthetic Polynucleotide
gccagctggccggaaaaaactgg

SEQ ID NO: 1414 - DNA, 23 bp, Artificial Sequence
  Synthetic Polynucleotide
ttttttccggccagctggcaggg

SEQ ID NO: 1415 - DNA, 23 bp, Artificial Sequence
  Synthetic Polynucleotide
agacaacaagaccctagtcctgg

SEQ ID NO: 1416 - DNA, 23 bp, Artificial Sequence
  Synthetic Polynucleotide
tccagttttttccggccagctgg

SEQ ID NO: 1417 - DNA, 15 bp, Artificial Sequence
  Synthetic Polynucleotide
  misc_feature (1)..(15): n is a, c, g, or t
nnnnnnnnnnnnnnn

SEQ ID NO: 1418 - DNA, 23 bp, Artificial Sequence
  Synthetic Polynucleotide
tggaaggcggcgtgaagcggcgg

SEQ ID NO: 1419 - DNA, 23 bp, Artificial Sequence
  Synthetic Polynucleotide
gcattttcaggaggaagcgatgg

SEQ ID NO: 1420 - DNA, 23 bp, Artificial Sequence
  Synthetic Polynucleotide
tagatgatcagaccaagcccggg

SEQ ID NO: 1421 - DNA, 23 bp, Artificial Sequence
  Synthetic Polynucleotide
catgccgatgccgatgcccgagg

SEQ ID NO: 1422 - DNA, 23 bp, Artificial Sequence
  Synthetic Polynucleotide
agagagggttgtcatgccgctgg

SEQ ID NO: 1423 - DNA, 23 bp, Artificial Sequence
  Synthetic Polynucleotide
ttctcttgcccgccctgcagcgg

SEQ ID NO: 1424 - DNA, 23 bp, Artificial Sequence
  Synthetic Polynucleotide
acgccggtcacctcgggcatcgg

SEQ ID NO: 1425 - DNA, 23 bp, Artificial Sequence
  Synthetic Polynucleotide
atttcacctggacgtgccagcgg

SEQ ID NO: 1426 - DNA, 23 bp, Artificial Sequence
  Synthetic Polynucleotide
ggagcttgtccttttccgagcgg

SEQ ID NO: 1427 - DNA, 23 bp, Artificial Sequence
  Synthetic Polynucleotide
gccgtagtacaggtggtaggagg

SEQ ID NO: 1428 - DNA, 23 bp, Artificial Sequence
  Synthetic Polynucleotide
gatgagcgaggcgttgccgctgg

SEQ ID NO: 1429 - DNA, 23 bp, Artificial Sequence
  Synthetic Polynucleotide
catcttgcctgggctcagcgcgg

SEQ ID NO: 1430 - DNA, 23 bp, Artificial Sequence
  Synthetic Polynucleotide
gactgatcgtaggaccacggtgg

SEQ ID NO: 1431 - DNA, 23 bp, Artificial Sequence
  Synthetic Polynucleotide
ccgtagtacaggtggtaggaggg

SEQ ID NO: 1432 - DNA, 23 bp, Artificial Sequence
  Synthetic Polynucleotide
tcaaggtactggcccggagaggg

SEQ ID NO: 1433 - DNA, 23 bp, Artificial Sequence
  Synthetic Polynucleotide
cggcatcggcatgtcggccatgg

SEQ ID NO: 1434 - DNA, 23 bp, Artificial Sequence
  Synthetic Polynucleotide
agatccaaccatccccaccgtgg

SEQ ID NO: 1435 - DNA, 23 bp, Artificial Sequence
  Synthetic Polynucleotide
ggtaggtggcgacttgcggtggg

SEQ ID NO: 1436 - DNA, 23 bp, Artificial Sequence
  Synthetic Polynucleotide
tgctccccacaataggacatcgg

SEQ ID NO: 1437 - DNA, 23 bp, Artificial Sequence
  Synthetic Polynucleotide
ctagatgatcagaccaagcccgg

SEQ ID NO: 1438 - DNA, 23 bp, Artificial Sequence
  Synthetic Polynucleotide
gatcagtcctaccaatacctggg

SEQ ID NO: 1439 - DNA, 23 bp, Artificial Sequence
  Synthetic Polynucleotide
gtcacctcgggcatcggcatcgg

SEQ ID NO: 1440 - DNA, 23 bp, Artificial Sequence
  Synthetic Polynucleotide
tggatagtgcatgcgggggtcgg

SEQ ID NO: 1441 - DNA, 23 bp, Artificial Sequence
  Synthetic Polynucleotide
atgagcgaggcgttgccgctggg

SEQ ID NO: 1442 - DNA, 23 bp, Artificial Sequence
  Synthetic Polynucleotide
ggcatcggcatgtcggccatggg

SEQ ID NO: 1443 - DNA, 23 bp, Artificial Sequence
  Synthetic Polynucleotide
tcgctttcaaggtactggcccgg

SEQ ID NO: 1444 - DNA, 23 bp, Artificial Sequence
  Synthetic Polynucleotide
tccctgcgcttgcgacgagccgg

SEQ ID NO: 1445 - DNA, 23 bp, Artificial Sequence
  Synthetic Polynucleotide
gcgcctggatagtgcatgcgggg

SEQ ID NO: 1446 - DNA, 23 bp, Artificial Sequence
  Synthetic Polynucleotide
ggcgcctggatagtgcatgcggg

SEQ ID NO: 1447 - DNA, 23 bp, Artificial Sequence
  Synthetic Polynucleotide
ctgtggtaggtggcgacttgcgg

SEQ ID NO: 1448 - DNA, 23 bp, Artificial Sequence
  Synthetic Polynucleotide
ggctcgtgctggcatctacgggg

SEQ ID NO: 1449 - DNA, 23 bp, Artificial Sequence
  Synthetic Polynucleotide
ctcggaaaaggacaagctcccgg

SEQ ID NO: 1450 - DNA, 23 bp, Artificial Sequence
  Synthetic Polynucleotide
gtcgccgctcctcagcttgccgg

SEQ ID NO: 1451 - DNA, 23 bp, Artificial Sequence
  Synthetic Polynucleotide
gtcgctgaacgctgtcaggtcgg

SEQ ID NO: 1452 - DNA, 23 bp, Artificial Sequence
  Synthetic Polynucleotide
cgaagtaagtgcatccacttggg

SEQ ID NO: 1453 - DNA, 23 bp, Artificial Sequence
  Synthetic Polynucleotide
atgccgatgcccgaggtgaccgg

SEQ ID NO: 1454 - DNA, 23 bp, Artificial Sequence
  Synthetic Polynucleotide
aggcgcctggatagtgcatgcgg

SEQ ID NO: 1455 - DNA, 23 bp, Artificial Sequence
  Synthetic Polynucleotide
gggcatcggcatcggcatgtcgg

SEQ ID NO: 1456 - DNA, 23 bp, Artificial Sequence
  Synthetic Polynucleotide
ctccagttcactgagccgctcgg

SEQ ID NO: 1457 - DNA, 23 bp, Artificial Sequence
  Synthetic Polynucleotide
ttccgagcggctcagtgaactgg

SEQ ID NO: 1458 - DNA, 23 bp, Artificial Sequence
  Synthetic Polynucleotide
cgatcagtcctaccaatacctgg

SEQ ID NO: 1459 - DNA, 23 bp, Artificial Sequence
  Synthetic Polynucleotide
tccaccacgtcgctctggttcgg

SEQ ID NO: 1460 - DNA, 23 bp, Artificial Sequence
  Synthetic Polynucleotide
gcggctcgtgctggcatctacgg

SEQ ID NO: 1461 - DNA, 23 bp, Artificial Sequence
  Synthetic Polynucleotide
tcgaagtaagtgcatccacttgg

SEQ ID NO: 1462 - DNA, 23 bp, Artificial Sequence
  Synthetic Polynucleotide
gcacttacttcgaggttctcggg

SEQ ID NO: 1463 - DNA, 23 bp, Artificial Sequence
  Synthetic Polynucleotide
tgcacttacttcgaggttctcgg

SEQ ID NO: 1464 - DNA, 23 bp, Artificial Sequence
  Synthetic Polynucleotide
tggtaggtggcgacttgcggtgg

SEQ ID NO: 1465 - DNA, 23 bp, Artificial Sequence
  Synthetic Polynucleotide
cggtggaaggcggcgtgaagcgg

SEQ ID NO: 1466 - DNA, 23 bp, Artificial Sequence
  Synthetic Polynucleotide
catggagaactggtaggagccgg

SEQ ID NO: 1467 - DNA, 23 bp, Artificial Sequence
  Synthetic Polynucleotide
tcagtgaactggagcagctgcgg

SEQ ID NO: 1468 - DNA, 20 bp, Artificial Sequence
  Synthetic Polynucleotide
  misc_feature (1)..(20): n is a, c, g, or t
nnnnnnnnnnnnnnnnnnnn

SEQ ID NO: 1469 - DNA, 23 bp, Artificial Sequence
  Synthetic Polynucleotide
cggtacttcggttcaggcggagg

SEQ ID NO: 1470 - DNA, 23 bp, Artificial Sequence
  Synthetic Polynucleotide
ggacgcgttcaagtaagcgtagg

SEQ ID NO: 1471 - DNA, 23 bp, Artificial Sequence
  Synthetic Polynucleotide
cggatggggtaaacgacccgagg

SEQ ID NO: 1472 - DNA, 23 bp, Artificial Sequence
  Synthetic Polynucleotide
attcgggtcagatcttccaaggg

SEQ ID NO: 1473 - DNA, 23 bp, Artificial Sequence
  Synthetic Polynucleotide
cctgaaagggaactgcgctgcgg

SEQ ID NO: 1474 - DNA, 23 bp, Artificial Sequence
  Synthetic Polynucleotide
tacgaggggatgaaagctggcgg

SEQ ID NO: 1475 - DNA, 23 bp, Artificial Sequence
  Synthetic Polynucleotide
tgaccggctcgaggacgtggagg

SEQ ID NO: 1476 - DNA, 23 bp, Artificial Sequence
  Synthetic Polynucleotide
cagtgccttctcctttaccgggg

SEQ ID NO: 1477 - DNA, 23 bp, Artificial Sequence
  Synthetic Polynucleotide
cacaagcgggtctcccacggcgg

SEQ ID NO: 1478 - DNA, 23 bp, Artificial Sequence
  Synthetic Polynucleotide
ttacaattcatgccgtagggggg

SEQ ID NO: 1479 - DNA, 23 bp, Artificial Sequence
  Synthetic Polynucleotide
gggtagtgagcgttgtacgaggg

SEQ ID NO: 1480 - DNA, 23 bp, Artificial Sequence
  Synthetic Polynucleotide
cattaaagccgtcaatgaagtgg

SEQ ID NO: 1481 - DNA, 23 bp, Artificial Sequence
  Synthetic Polynucleotide
ggtagtgagcgttgtacgagggg

SEQ ID NO: 1482 - DNA, 23 bp, Artificial Sequence
  Synthetic Polynucleotide
gcacaagcgtctgcacacccggg

SEQ ID NO: 1483 - DNA, 23 bp, Artificial Sequence
  Synthetic Polynucleotide
gaatccagcacactctccccggg

SEQ ID NO: 1484 - DNA, 23 bp, Artificial Sequence
  Synthetic Polynucleotide
ccccacaagcgggtctcccacgg

SEQ ID NO: 1485 - DNA, 23 bp, Artificial Sequence
  Synthetic Polynucleotide
ctgtagacagggcacagcctcgg

SEQ ID NO: 1486 - DNA, 23 bp, Artificial Sequence
  Synthetic Polynucleotide
ggggagcgagtgatgtacgtggg

SEQ ID NO: 1487 - DNA, 23 bp, Artificial Sequence
  Synthetic Polynucleotide
aaggcctgtagccccacaagcgg

SEQ ID NO: 1488 - DNA, 23 bp, Artificial Sequence
  Synthetic Polynucleotide
tgaggggtgaaatgttagaacgg

SEQ ID NO: 1489 - DNA, 23 bp, Artificial Sequence
  Synthetic Polynucleotide
acaagcgggtctcccacggcggg

SEQ ID NO: 1490 - DNA, 23 bp, Artificial Sequence
  Synthetic Polynucleotide
tacccgctgaagaagcagaacgg

SEQ ID NO: 1491 - DNA, 23 bp, Artificial Sequence
  Synthetic Polynucleotide
tggcggtacttcggttcaggcgg

SEQ ID NO: 1492 - DNA, 23 bp, Artificial Sequence
  Synthetic Polynucleotide
aggcctgtagccccacaagcggg

SEQ ID NO: 1493 - DNA, 23 bp, Artificial Sequence
  Synthetic Polynucleotide
ctcgatgactttagaagacgtgg

SEQ ID NO: 1494 - DNA, 23 bp, Artificial Sequence
  Synthetic Polynucleotide
cttgaacgcgtcctacggcacgg

SEQ ID NO: 1495 - DNA, 23 bp, Artificial Sequence
  Synthetic Polynucleotide
ggggtagtgagcgttgtacgagg

SEQ ID NO: 1496 - DNA, 23 bp, Artificial Sequence
  Synthetic Polynucleotide
tggacagatctattccagagggg

SEQ ID NO: 1497 - DNA, 23 bp, Artificial Sequence
  Synthetic Polynucleotide
attacaattcatgccgtaggggg

SEQ ID NO: 1498 - DNA, 23 bp, Artificial Sequence
  Synthetic Polynucleotide
gcttacttgaacgcgtcctacgg

SEQ ID NO: 1499 - DNA, 23 bp, Artificial Sequence
  Synthetic Polynucleotide
tgctgaccggctcgaggacgtgg

SEQ ID NO: 1500 - DNA, 23 bp, Artificial Sequence
  Synthetic Polynucleotide
catcctccacgtcctcgagccgg

SEQ ID NO: 1501 - DNA, 23 bp, Artificial Sequence
  Synthetic Polynucleotide
gtcccggtgctcttgagagccgg

SEQ ID NO: 1502 - DNA, 23 bp, Artificial Sequence
  Synthetic Polynucleotide
gattcgggtcagatcttccaagg

SEQ ID NO: 1503 - DNA, 23 bp, Artificial Sequence
  Synthetic Polynucleotide
tgggaatacggtgtcccctgtgg

SEQ ID NO: 1504 - DNA, 23 bp, Artificial Sequence
  Synthetic Polynucleotide
tcatgccgtaggggggcaagagg

SEQ ID NO: 1505 - DNA, 23 bp, Artificial Sequence
  Synthetic Polynucleotide
caccacatgttctgccgtggcgg

SEQ ID NO: 1506 - DNA, 23 bp, Artificial Sequence
  Synthetic Polynucleotide
aacgcgtcctacggcacggaagg

SEQ ID NO: 1507 - DNA, 23 bp, Artificial Sequence
  Synthetic Polynucleotide
ccgaaatgcccttctaccctcgg

SEQ ID NO: 1508 - DNA, 23 bp, Artificial Sequence
  Synthetic Polynucleotide
gggggagcgagtgatgtacgtgg

SEQ ID NO: 1509 - DNA, 23 bp, Artificial Sequence
  Synthetic Polynucleotide
ttgaaagcttccctggcctacgg

SEQ ID NO: 1510 - DNA, 23 bp, Artificial Sequence
  Synthetic Polynucleotide
gttctgcttcttcagcgggtagg

SEQ ID NO: 1511 - DNA, 23 bp, Artificial Sequence
  Synthetic Polynucleotide
acatcagtgacaatgctgaccgg

SEQ ID NO: 1512 - DNA, 23 bp, Artificial Sequence
  Synthetic Polynucleotide
gagcttcaccacttcattgacgg

SEQ ID NO: 1513 - DNA, 23 bp, Artificial Sequence
  Synthetic Polynucleotide
taaacgacccgagggtagaaggg

SEQ ID NO: 1514 - DNA, 23 bp, Artificial Sequence
  Synthetic Polynucleotide
tgatggcggtacttcggttcagg

SEQ ID NO: 1515 - DNA, 23 bp, Artificial Sequence
  Synthetic Polynucleotide
cagttcctaagaacgccaacagg

SEQ ID NO: 1516 - DNA, 23 bp, Artificial Sequence
  Synthetic Polynucleotide
tcgggtcgtttaccccatccggg

SEQ ID NO: 1517 - DNA, 23 bp, Artificial Sequence
  Synthetic Polynucleotide
aagttcctcttgcccccctacgg

SEQ ID NO: 1518 - DNA, 23 bp, Artificial Sequence
  Synthetic Polynucleotide
agcccggaggttgctccagccgg

SEQ ID NO: 1519 - DNA, 21 bp, Artificial Sequence
  Synthetic Polynucleotide
  misc_feature (1)..(21): n is a, c, g, or t
nnnnnnnnnnnnnnnnnnnnn

SEQ ID NO: 1520 - DNA, 23 bp, Artificial Sequence
  Synthetic Polynucleotide
atggcgtacagtcaaggaggcgg

SEQ ID NO: 1521 - DNA, 23 bp, Artificial Sequence
  Synthetic Polynucleotide
ttttgtcagctctcaactggcgg

SEQ ID NO: 1522 - DNA, 23 bp, Artificial Sequence
  Synthetic Polynucleotide
cagttcgagcatcagacaagcgg

SEQ ID NO: 1523 - DNA, 23 bp, Artificial Sequence
  Synthetic Polynucleotide
gctactactacgacggtgagcgg

SEQ ID NO: 1524 - DNA, 23 bp, Artificial Sequence
  Synthetic Polynucleotide
gagcccatggcgtacagtcaagg

SEQ ID NO: 1525 - DNA, 23 bp, Artificial Sequence
  Synthetic Polynucleotide
actgtacgccatgggctccccgg

SEQ ID NO: 1526 - DNA, 23 bp, Artificial Sequence
  Synthetic Polynucleotide
tccaacatcgagcaacattacgg

SEQ ID NO: 1527 - DNA, 23 bp, Artificial Sequence
  Synthetic Polynucleotide
cgcatgttacctcatgcacctgg

SEQ ID NO: 1528 - DNA, 23 bp, Artificial Sequence
  Synthetic Polynucleotide
cagccatatcagtctgttgtcgg

SEQ ID NO: 1529 - DNA, 23 bp, Artificial Sequence
  Synthetic Polynucleotide
tactacgacggtgagcggccggg

SEQ ID NO: 1530 - DNA, 23 bp, Artificial Sequence
  Synthetic Polynucleotide
ctactacgacggtgagcggccgg

SEQ ID NO: 1531 - DNA, 23 bp, Artificial Sequence
  Synthetic Polynucleotide
tgggtcatgcggattctatgagg

SEQ ID NO: 1532 - DNA, 23 bp, Artificial Sequence
  Synthetic Polynucleotide
acagcaagttatgggtcatgcgg

SEQ ID NO: 1533 - DNA, 23 bp, Artificial Sequence
  Synthetic Polynucleotide
cctccttgactgtacgccatggg

SEQ ID NO: 1534 - DNA, 23 bp, Artificial Sequence
  Synthetic Polynucleotide
tccgtaatgttgctcgatgttgg

SEQ ID NO: 1535 - DNA, 23 bp, Artificial Sequence
  Synthetic Polynucleotide
tacaacagatcgtgtaatgacgg

SEQ ID NO: 1536 - DNA, 23 bp, Artificial Sequence
  Synthetic Polynucleotide
atgagtatatcaaatttctacgg

SEQ ID NO: 1537 - DNA, 23 bp, Artificial Sequence
  Synthetic Polynucleotide
gactgatatggctgttaattggg

SEQ ID NO: 1538 - DNA, 23 bp, Artificial Sequence
  Synthetic Polynucleotide
aaaccgacaacagactgatatgg

SEQ ID NO: 1539 - DNA, 23 bp, Artificial Sequence
  Synthetic Polynucleotide
gaagattgtccagtgtttgatgg

SEQ ID NO: 1540 - DNA, 23 bp, Artificial Sequence
  Synthetic Polynucleotide
ctctcaactggcggttcagttgg

SEQ ID NO: 1541 - DNA, 23 bp, Artificial Sequence
  Synthetic Polynucleotide
gcggattctatgaggcttcatgg

SEQ ID NO: 1542 - DNA, 23 bp, Artificial Sequence
  Synthetic Polynucleotide
ctaatatgcagtttgaagtctgg

SEQ ID NO: 1543 - DNA, 23 bp, Artificial Sequence
  Synthetic Polynucleotide
agactgatatggctgttaattgg

SEQ ID NO: 1544 - DNA, 23 bp, Artificial Sequence
  Synthetic Polynucleotide
gcctccttgactgtacgccatgg

SEQ ID NO: 1545 - DNA, 23 bp, Artificial Sequence
  Synthetic Polynucleotide
atagcttgcatctggacaccagg

SEQ ID NO: 1546 - DNA, 23 bp, Artificial Sequence
  Synthetic Polynucleotide
ctcattatctggtgatagactgg

SEQ ID NO: 1547 - DNA, 23 bp, Artificial Sequence
  Synthetic Polynucleotide
tgtggtgcagactcattatctgg

SEQ ID NO: 1548 - DNA, 23 bp, Artificial Sequence
  Synthetic Polynucleotide
acgacggtgagcggccgggccgg

SEQ ID NO: 1549 - DNA, 23 bp, Artificial Sequence
  Synthetic Polynucleotide
cggtatcattccataaatatggg

SEQ ID NO: 1550 - DNA, 23 bp, Artificial Sequence
  Synthetic Polynucleotide
gtgatattttgtcatttcttcgg

SEQ ID NO: 1551 - DNA, 23 bp, Artificial Sequence
  Synthetic Polynucleotide
tcaaagagtccatcaaacactgg

SEQ ID NO: 1552 - DNA, 23 bp, Artificial Sequence
  Synthetic Polynucleotide
aacttaccattactgatgcttgg

SEQ ID NO: 1553 - DNA, 23 bp, Artificial Sequence
  Synthetic Polynucleotide
atggctgttaattgggctggagg

SEQ ID NO: 1554 - DNA, 23 bp, Artificial Sequence
  Synthetic Polynucleotide
aaagtctgctactactacgacgg

SEQ ID NO: 1555 - DNA, 23 bp, Artificial Sequence
  Synthetic Polynucleotide
gatgtatcaacctagtgctgtgg

SEQ ID NO: 1556 - DNA, 23 bp, Artificial Sequence
  Synthetic Polynucleotide
tcttcggcagtggctttatgggg

SEQ ID NO: 1557 - DNA, 23 bp, Artificial Sequence
  Synthetic Polynucleotide
tcctggcacaggagacttgaggg

SEQ ID NO: 1558 - DNA, 23 bp, Artificial Sequence
  Synthetic Polynucleotide
cggattctatgaggcttcatggg

SEQ ID NO: 1559 - DNA, 23 bp, Artificial Sequence
  Synthetic Polynucleotide
ttcttcggcagtggctttatggg

SEQ ID NO: 1560 - DNA, 23 bp, Artificial Sequence
  Synthetic Polynucleotide
tgatttggttctgttaaaagagg

SEQ ID NO: 1561 - DNA, 23 bp, Artificial Sequence
  Synthetic Polynucleotide
gtcaattttccaatgagagatgg

SEQ ID NO: 1562 - DNA, 23 bp, Artificial Sequence
  Synthetic Polynucleotide
ggtatcattccataaatatgggg

SEQ ID NO: 1563 - DNA, 23 bp, Artificial Sequence
  Synthetic Polynucleotide
tcattatctggtgatagactggg

SEQ ID NO: 1564 - DNA, 23 bp, Artificial Sequence
  Synthetic Polynucleotide
gtatagatgatgagtcatatggg

SEQ ID NO: 1565 - DNA, 23 bp, Artificial Sequence
  Synthetic Polynucleotide
aacaggtcagatttgtttcttgg

SEQ ID NO: 1566 - DNA, 23 bp, Artificial Sequence
  Synthetic Polynucleotide
cttgattgtgagattcccaatgg

SEQ ID NO: 1567 - DNA, 23 bp, Artificial Sequence
  Synthetic Polynucleotide
ggggaatactttcctggcacagg

SEQ ID NO: 1568 - DNA, 23 bp, Artificial Sequence
  Synthetic Polynucleotide
aaggaacatcatttaccctttgg

SEQ ID NO: 1569 - DNA, 23 bp, Artificial Sequence
  Synthetic Polynucleotide
ctatactcagacatgttatctgg

SEQ ID NO: 1570 - DNA, 20 bp, Artificial Sequence
  Synthetic Polynucleotide
  misc_feature (1)..(20): n is a, c, g, or t
nnnnnnnnnnnnnnnnnnnn

SEQ ID NO: 1571 - DNA, 23 bp, Artificial Sequence
  Synthetic Polynucleotide
ttttctgatctttttctagtcgg

SEQ ID NO: 1572 - DNA, 23 bp, Artificial Sequence
  Synthetic Polynucleotide
agcccccggtccctgagaagcgg

SEQ ID NO: 1573 - DNA, 23 bp, Artificial Sequence
  Synthetic Polynucleotide
gagtggtgtagcccctacagggg

SEQ ID NO: 1574 - DNA, 23 bp, Artificial Sequence
  Synthetic Polynucleotide
gggtcacttctcctgaacgccgg

SEQ ID NO: 1575 - DNA, 23 bp, Artificial Sequence
  Synthetic Polynucleotide
ggcagggtttcttcactacgagg

SEQ ID NO: 1576 - DNA, 23 bp, Artificial Sequence
  Synthetic Polynucleotide
agatgcggggtctaccgagaggg

SEQ ID NO: 1577 - DNA, 23 bp, Artificial Sequence
  Synthetic Polynucleotide
cagcagcgcccccatctcagcgg

SEQ ID NO: 1578 - DNA, 23 bp, Artificial Sequence
  Synthetic Polynucleotide
cacgcgctcatccacagagtagg

SEQ ID NO: 1579 - DNA, 23 bp, Artificial Sequence
  Synthetic Polynucleotide
ctgtcattgacatcttggcccgg

SEQ ID NO: 1580 - DNA, 23 bp, Artificial Sequence
  Synthetic Polynucleotide
cccggggtcccctttcgtcaggg

SEQ ID NO: 1581 - DNA, 23 bp, Artificial Sequence
  Synthetic Polynucleotide
tttgcgggctcggtggaccttgg

SEQ ID NO: 1582 - DNA, 23 bp, Artificial Sequence
  Synthetic Polynucleotide
gtaggggctacaccactcattgg

SEQ ID NO: 1583 - DNA, 23 bp, Artificial Sequence
  Synthetic Polynucleotide
aggggggttcctgtcctagccgg

SEQ ID NO: 1584 - DNA, 23 bp, Artificial Sequence
  Synthetic Polynucleotide
ctactctgtggatgagcgcgtgg

SEQ ID NO: 1585 - DNA, 23 bp, Artificial Sequence
  Synthetic Polynucleotide
ggtcacttctcctgaacgccggg

SEQ ID NO: 1586 - DNA, 23 bp, Artificial Sequence
  Synthetic Polynucleotide
ttctctcggccccagagatgcgg

SEQ ID NO: 1587 - DNA, 23 bp, Artificial Sequence
  Synthetic Polynucleotide
agtggacatcatcactcatgcgg

SEQ ID NO: 1588 - DNA, 23 bp, Artificial Sequence
  Synthetic Polynucleotide
accctgacgaaaggggaccccgg

SEQ ID NO: 1589 - DNA, 23 bp, Artificial Sequence
  Synthetic Polynucleotide
agaggtgagtgcagctaaaacgg

SEQ ID NO: 1590 - DNA, 23 bp, Artificial Sequence
  Synthetic Polynucleotide
tcggtagaccccgcatctctggg

SEQ ID NO: 1591 - DNA, 23 bp, Artificial Sequence
  Synthetic Polynucleotide
gcgcgtggactccgacagcaagg

SEQ ID NO: 1592 - DNA, 23 bp, Artificial Sequence
  Synthetic Polynucleotide
ttgcgggctcggtggaccttggg

SEQ ID NO: 1593 - DNA, 23 bp, Artificial Sequence
  Synthetic Polynucleotide
cgggccaagatgtcaatgacagg

SEQ ID NO: 1594 - DNA, 23 bp, Artificial Sequence
  Synthetic Polynucleotide
attgacatcttggcccggctagg

SEQ ID NO: 1595 - DNA, 23 bp, Artificial Sequence
  Synthetic Polynucleotide
gagtgatgatgtccactcactgg

SEQ ID NO: 1596 - DNA, 23 bp, Artificial Sequence
  Synthetic Polynucleotide
taggggctacaccactcattggg

SEQ ID NO: 1597 - DNA, 23 bp, Artificial Sequence
  Synthetic Polynucleotide
ctcccactcctccagggacccgg

SEQ ID NO: 1598 - DNA, 23 bp, Artificial Sequence
  Synthetic Polynucleotide
ttagctgcactcacctctctcgg

SEQ ID NO: 1599 - DNA, 23 bp, Artificial Sequence
  Synthetic Polynucleotide
cgcatcaaccccctccctctcgg

SEQ ID NO: 1600 - DNA, 23 bp, Artificial Sequence
  Synthetic Polynucleotide
ttaggttctgcccggcgttcagg

SEQ ID NO: 1601 - DNA, 23 bp, Artificial Sequence
  Synthetic Polynucleotide
ctcggtagaccccgcatctctgg

SEQ ID NO: 1602 - DNA, 23 bp, Artificial Sequence
  Synthetic Polynucleotide
cggaggagttaggttctgcccgg

SEQ ID NO: 1603 - DNA, 23 bp, Artificial Sequence
  Synthetic Polynucleotide
caagatgtcaatgacaggggcgg

SEQ ID NO: 1604 - DNA, 23 bp, Artificial Sequence
  Synthetic Polynucleotide
gagatgcggggtctaccgagagg

SEQ ID NO: 1605 - DNA, 23 bp, Artificial Sequence
  Synthetic Polynucleotide
cggggtctaccgagagggagggg

SEQ ID NO: 1606 - DNA, 23 bp, Artificial Sequence
  Synthetic Polynucleotide
agaagtgaccctgacgaaagggg

SEQ ID NO: 1607 - DNA, 23 bp, Artificial Sequence
  Synthetic Polynucleotide
cagggtttcttcactacgagggg

SEQ ID NO: 1608 - DNA, 23 bp, Artificial Sequence
  Synthetic Polynucleotide
gcagggtttcttcactacgaggg

SEQ ID NO: 1609 - DNA, 23 bp, Artificial Sequence
  Synthetic Polynucleotide
cgagagggagggggttgatgcgg

SEQ ID NO: 1610 - DNA, 23 bp, Artificial Sequence
  Synthetic Polynucleotide
cggtagaccccgcatctctgggg

SEQ ID NO: 1611 - DNA, 23 bp, Artificial Sequence
  Synthetic Polynucleotide
tggtcagcccagtagagagttgg

SEQ ID NO: 1612 - DNA, 23 bp, Artificial Sequence
  Synthetic Polynucleotide
aggggctacaccactcattgggg

SEQ ID NO: 1613 - DNA, 23 bp, Artificial Sequence
  Synthetic Polynucleotide
gctctgtctcaccttgctgtcgg

SEQ ID NO: 1614 - DNA, 23 bp, Artificial Sequence
  Synthetic Polynucleotide
tctctcggccccagagatgcggg

SEQ ID NO: 1615 - DNA, 23 bp, Artificial Sequence
  Synthetic Polynucleotide
acccggggtcccctttcgtcagg

SEQ ID NO: 1616 - DNA, 23 bp, Artificial Sequence
  Synthetic Polynucleotide
ggaccccccaactctctactggg

SEQ ID NO: 1617 - DNA, 23 bp, Artificial Sequence
  Synthetic Polynucleotide
atgagtggtgtagcccctacagg

SEQ ID NO: 1618 - DNA, 23 bp, Artificial Sequence
  Synthetic Polynucleotide
aggacaggaaccccccttgctgg

SEQ ID NO: 1619 - DNA, 23 bp, Artificial Sequence
  Synthetic Polynucleotide
ctggtttggacatggttttgcgg

SEQ ID NO: 1620 - DNA, 23 bp, Artificial Sequence
  Synthetic Polynucleotide
tggacatggttttgcgggctcgg

SEQ ID NO: 1621 - DNA, 17 bp, Artificial Sequence
  Synthetic Polynucleotide
  misc_feature (1)..(17): n is a, c, g, or t
nnnnnnnnnnnnnnnnn

SEQ ID NO: 1622 - DNA, 23 bp, Artificial Sequence
  Synthetic Polynucleotide
tcgagaaggagcgcatgcggagg

SEQ ID NO: 1623 - DNA, 23 bp, Artificial Sequence
  Synthetic Polynucleotide
cctgcagtcctactatgccgtgg

SEQ ID NO: 1624 - DNA, 23 bp, Artificial Sequence
  Synthetic Polynucleotide
ctgctgcaaggcagaaccggcgg

SEQ ID NO: 1625 - DNA, 23 bp, Artificial Sequence
  Synthetic Polynucleotide
gatcatcaaggacgacgcggagg

SEQ ID NO: 1626 - DNA, 23 bp, Artificial Sequence
  Synthetic Polynucleotide
cctggctcgagatgaacccgggg

SEQ ID NO: 1627 - DNA, 23 bp, Artificial Sequence
  Synthetic Polynucleotide
tcgggcagctcctttcgcgaggg

SEQ ID NO: 1628 - DNA, 23 bp, Artificial Sequence
  Synthetic Polynucleotide
gaggagaagatgttcggccgtgg

SEQ ID NO: 1629 - DNA, 23 bp, Artificial Sequence
  Synthetic Polynucleotide
gcagcgggtactcacgagagagg

SEQ ID NO: 1630 - DNA, 23 bp, Artificial Sequence
  Synthetic Polynucleotide
gatgatcgcccggcacgaggagg

SEQ ID NO: 1631 - DNA, 23 bp, Artificial Sequence
  Synthetic Polynucleotide
tgcagtggcaccatgggcgcggg

SEQ ID NO: 1632 - DNA, 23 bp, Artificial Sequence
  Synthetic Polynucleotide
agaagcagaagaagcgcgggcgg

SEQ ID NO: 1633 - DNA, 23 bp, Artificial Sequence
  Synthetic Polynucleotide
agacaccttcaccacggaggggg

SEQ ID NO: 1634 - DNA, 23 bp, Artificial Sequence
  Synthetic Polynucleotide
gaagccgcgcctcatggaggagg

SEQ ID NO: 1635 - DNA, 23 bp, Artificial Sequence
  Synthetic Polynucleotide
atccgaatgtgagtcccgggggg

SEQ ID NO: 1636 - DNA, 23 bp, Artificial Sequence
  Synthetic Polynucleotide
cccgtcaggaaccacgaaggcgg

SEQ ID NO: 1637 - DNA, 23 bp, Artificial Sequence
  Synthetic Polynucleotide
gtaagacaccttcaccacggagg

SEQ ID NO: 1638 - DNA, 23 bp, Artificial Sequence
  Synthetic Polynucleotide
gagcacttggggttcactggcgg

SEQ ID NO: 1639 - DNA, 23 bp, Artificial Sequence
  Synthetic Polynucleotide
cgtaccatgccaacacggagcgg

SEQ ID NO: 1640 - DNA, 23 bp, Artificial Sequence
  Synthetic Polynucleotide
accacgaaggcggaggaccgggg

SEQ ID NO: 1641 - DNA, 23 bp, Artificial Sequence
  Synthetic Polynucleotide
tccgaatgtgagtcccggggggg

SEQ ID NO: 1642 - DNA, 23 bp, Artificial Sequence
  Synthetic Polynucleotide
agtcggtcttcaccagcgtgcgg

SEQ ID NO: 1643 - DNA, 23 bp, Artificial Sequence
  Synthetic Polynucleotide
ttgcgaatgcgctcctgcagtgg

SEQ ID NO: 1644 - DNA, 23 bp, Artificial Sequence
  Synthetic Polynucleotide
aagcaccaggtacgctccggtgg

SEQ ID NO: 1645 - DNA, 23 bp, Artificial Sequence
  Synthetic Polynucleotide
gaatccgaatgtgagtcccgggg

SEQ ID NO: 1646 - DNA, 23 bp, Artificial Sequence
  Synthetic Polynucleotide
atctggctggtctcgtccagagg

SEQ ID NO: 1647 - DNA, 23 bp, Artificial Sequence
  Synthetic Polynucleotide
ggtcctgttgcggacaccgaggg

SEQ ID NO: 1648 - DNA, 23 bp, Artificial Sequence
  Synthetic Polynucleotide
gtgcagtggcaccatgggcgcgg

SEQ ID NO: 1649 - DNA, 23 bp, Artificial Sequence
  Synthetic Polynucleotide
gggggcagcagcattcgccatgg

SEQ ID NO: 1650 - DNA, 23 bp, Artificial Sequence
  Synthetic Polynucleotide
ccagatgatcgcccggcacgagg

SEQ ID NO: 1651 - DNA, 23 bp, Artificial Sequence
  Synthetic Polynucleotide
gaggtacgtgatgagcgcgatgg

SEQ ID NO: 1652 - DNA, 23 bp, Artificial Sequence
  Synthetic Polynucleotide
acgtctctgaggtggacgcgcgg

SEQ ID NO: 1653 - DNA, 23 bp, Artificial Sequence
  Synthetic Polynucleotide
agcaagaagcagaagaagcgcgg

SEQ ID NO: 1654 - DNA, 23 bp, Artificial Sequence
  Synthetic Polynucleotide
accgagggtggaggtagcgttgg

SEQ ID NO: 1655 - DNA, 23 bp, Artificial Sequence
  Synthetic Polynucleotide
gtggatcatcaaggacgacgcgg

SEQ ID NO: 1656 - DNA, 23 bp, Artificial Sequence
  Synthetic Polynucleotide
agatggcggtgcagggcaagcgg

SEQ ID NO: 1657 - DNA, 23 bp, Artificial Sequence
  Synthetic Polynucleotide
cgctgttgacggtgcagaggcgg

SEQ ID NO: 1658 - DNA, 23 bp, Artificial Sequence
  Synthetic Polynucleotide
gctcggcctgaacctccagtcgg

SEQ ID NO: 1659 - DNA, 23 bp, Artificial Sequence
  Synthetic Polynucleotide
agtgctctaccgccacatgcagg

SEQ ID NO: 1660 - DNA, 23 bp, Artificial Sequence
  Synthetic Polynucleotide
agtacaaggacaggtaagcgagg

SEQ ID NO: 1661 - DNA, 23 bp, Artificial Sequence
  Synthetic Polynucleotide
actttgacggaccgagctggagg

SEQ ID NO: 1662 - DNA, 23 bp, Artificial Sequence
  Synthetic Polynucleotide
gaagaccgactgcaagacgatgg

SEQ ID NO: 1663 - DNA, 23 bp, Artificial Sequence
  Synthetic Polynucleotide
cgcaccctttgccatgaccgggg

SEQ ID NO: 1664 - DNA, 23 bp, Artificial Sequence
  Synthetic Polynucleotide
agagaacgagcggatcgagaagg

SEQ ID NO: 1665 - DNA, 23 bp, Artificial Sequence
  Synthetic Polynucleotide
tgaacaccatcatgcagctgcgg

SEQ ID NO: 1666 - DNA, 23 bp, Artificial Sequence
  Synthetic Polynucleotide
ggttcgcaaatccccggccaggg

SEQ ID NO: 1667 - DNA, 23 bp, Artificial Sequence
  Synthetic Polynucleotide
gcagcactttgtggagacgccgg

SEQ ID NO: 1668 - DNA, 23 bp, Artificial Sequence
  Synthetic Polynucleotide
gcctggctcgagatgaacccggg

SEQ ID NO: 1669 - DNA, 23 bp, Artificial Sequence
  Synthetic Polynucleotide
ctcgggcagctcctttcgcgagg

SEQ ID NO: 1670 - DNA, 23 bp, Artificial Sequence
  Synthetic Polynucleotide
tgctctcgtcgtccttgtcgcgg

SEQ ID NO: 1671 - DNA, 23 bp, Artificial Sequence
  Synthetic Polynucleotide
gggtcctgttgcggacaccgagg

SEQ ID NO: 1672 - DNA, 18 bp, Artificial Sequence
  Synthetic Polynucleotide
  misc_feature (1)..(18): n is a, c, g, or t
nnnnnnnnnnnnnnnnnn

SEQ ID NO: 1673 - DNA, 23 bp, Artificial Sequence
  Synthetic Polynucleotide
ctgtcggagcttctacgaggagg

SEQ ID NO: 1674 - DNA, 23 bp, Artificial Sequence
  Synthetic Polynucleotide
cagctccatgggccagatggcgg

SEQ ID NO: 1675 - DNA, 23 bp, Artificial Sequence
  Synthetic Polynucleotide
tgtgcacccatcatgttcggagg

SEQ ID NO: 1676 - DNA, 23 bp, Artificial Sequence
  Synthetic Polynucleotide
ttgcaatcaacgaaactaggagg

SEQ ID NO: 1677 - DNA, 23 bp, Artificial Sequence
  Synthetic Polynucleotide
gcgtccacagcaatatccaaggg

SEQ ID NO: 1678 - DNA, 23 bp, Artificial Sequence
  Synthetic Polynucleotide
ttctcggcgaatgacagcacagg

SEQ ID NO: 1679 - DNA, 23 bp, Artificial Sequence
  Synthetic Polynucleotide
ccgctcacctggttgggtcgggg

SEQ ID NO: 1680 - DNA, 23 bp, Artificial Sequence
  Synthetic Polynucleotide
acgtcgtccacgtactgccaggg

SEQ ID NO: 1681 - DNA, 23 bp, Artificial Sequence
  Synthetic Polynucleotide
cttacaccggtgctagaaggagg

SEQ ID NO: 1682 - DNA, 23 bp, Artificial Sequence
  Synthetic Polynucleotide
cttagcccactgatgaacgatgg

SEQ ID NO: 1683 - DNA, 23 bp, Artificial Sequence
  Synthetic Polynucleotide
gcggcgatcctttagagctgcgg

SEQ ID NO: 1684 - DNA, 23 bp, Artificial Sequence
  Synthetic Polynucleotide
agctcttccgacttccctggggg

SEQ ID NO: 1685 - DNA, 23 bp, Artificial Sequence
  Synthetic Polynucleotide
taactgggggttcactccagtgg

SEQ ID NO: 1686 - DNA, 23 bp, Artificial Sequence
  Synthetic Polynucleotide
cacctggttactaagggacgtgg

SEQ ID NO: 1687 - DNA, 23 bp, Artificial Sequence
  Synthetic Polynucleotide
tttgtcgtgaagatgcacaatgg

SEQ ID NO: 1688 - DNA, 23 bp, Artificial Sequence
  Synthetic Polynucleotide
gaagagccatgcccataagatgg

SEQ ID NO: 1689 - DNA, 23 bp, Artificial Sequence
  Synthetic Polynucleotide
ttttgaggaaattgacggcgtgg

SEQ ID NO: 1690 - DNA, 23 bp, Artificial Sequence
  Synthetic Polynucleotide
aggtacccggcgctgaaggaagg

SEQ ID NO: 1691 - DNA, 23 bp, Artificial Sequence
  Synthetic Polynucleotide
aaactacctcgtgtttggagggg

SEQ ID NO: 1692 - DNA, 23 bp, Artificial Sequence
  Synthetic Polynucleotide
cggtgtgcctccacagcagcagg

SEQ ID NO: 1693 - DNA, 23 bp, Artificial Sequence
  Synthetic Polynucleotide
tggacaaggcgtttgcagagcgg

SEQ ID NO: 1694 - DNA, 23 bp, Artificial Sequence
  Synthetic Polynucleotide
agcggctctagtatcaacccagg

SEQ ID NO: 1695 - DNA, 23 bp, Artificial Sequence
  Synthetic Polynucleotide
ggctgcaaacgcaagaccaacgg

SEQ ID NO: 1696 - DNA, 23 bp, Artificial Sequence
  Synthetic Polynucleotide
cctttggattcaccaggatcggg

SEQ ID NO: 1697 - DNA, 23 bp, Artificial Sequence
  Synthetic Polynucleotide
gtacgagtctgccaacagcaggg

SEQ ID NO: 1698 - DNA, 23 bp, Artificial Sequence
  Synthetic Polynucleotide
gcagctcctccttctagcaccgg

SEQ ID NO: 1699 - DNA, 23 bp, Artificial Sequence
  Synthetic Polynucleotide
acggctgtgcggaggcaacgtgg

SEQ ID NO: 1700 - DNA, 23 bp, Artificial Sequence
  Synthetic Polynucleotide
gcgatgagctgcttgcacaccgg

SEQ ID NO: 1701 - DNA, 23 bp, Artificial Sequence
  Synthetic Polynucleotide
cgatacagtgcttctagggttgg

SEQ ID NO: 1702 - DNA, 23 bp, Artificial Sequence
  Synthetic Polynucleotide
taaaccagaggagttacgccagg

SEQ ID NO: 1703 - DNA, 23 bp, Artificial Sequence
  Synthetic Polynucleotide
actgaccgtgacttcatcccggg

SEQ ID NO: 1704 - DNA, 23 bp, Artificial Sequence
  Synthetic Polynucleotide
cagcgaactgtccctggtcgggg

SEQ ID NO: 1705 - DNA, 23 bp, Artificial Sequence
  Synthetic Polynucleotide
ggtggccagctcagacaagacgg

SEQ ID NO: 1706 - DNA, 23 bp, Artificial Sequence
  Synthetic Polynucleotide
tcaagcccgggatgaagtcacgg

SEQ ID NO: 1707 - DNA, 23 bp, Artificial Sequence
  Synthetic Polynucleotide
taagggacgtggcgatctgctgg

SEQ ID NO: 1708 - DNA, 23 bp, Artificial Sequence
  Synthetic Polynucleotide
gacacgcctgtttgggctggcgg

SEQ ID NO: 1709 - DNA, 23 bp, Artificial Sequence
  Synthetic Polynucleotide
ctttttttgcgcggctgcgaagg

SEQ ID NO: 1710 - DNA, 23 bp, Artificial Sequence
  Synthetic Polynucleotide
gcagcgagcagttggcgttgcgg

SEQ ID NO: 1711 - DNA, 23 bp, Artificial Sequence
  Synthetic Polynucleotide
gaagacgacacaggagttgatgg

SEQ ID NO: 1712 - DNA, 23 bp, Artificial Sequence
  Synthetic Polynucleotide
ttcgtgatccacctgcacgctgg

SEQ ID NO: 1713 - DNA, 23 bp, Artificial Sequence
  Synthetic Polynucleotide
aagtacgtggccaatcagcccgg

SEQ ID NO: 1714 - DNA, 23 bp, Artificial Sequence
  Synthetic Polynucleotide
cgcgtgaccagtcatttgcgggg

SEQ ID NO: 1715 - DNA, 23 bp, Artificial Sequence
  Synthetic Polynucleotide
cgatgagctgcttgcacaccggg

SEQ ID NO: 1716 - DNA, 23 bp, Artificial Sequence
  Synthetic Polynucleotide
catggccggtgggtagcctccgg

SEQ ID NO: 1717 - DNA, 23 bp, Artificial Sequence
  Synthetic Polynucleotide
gtccctggtcggggacaccacgg

SEQ ID NO: 1718 - DNA, 23 bp, Artificial Sequence
  Synthetic Polynucleotide
ctgtcattcgccgagaaaccggg

SEQ ID NO: 1719 - DNA, 23 bp, Artificial Sequence
  Synthetic Polynucleotide
gactctgctgaggcacgttgcgg

SEQ ID NO: 1720 - DNA, 23 bp, Artificial Sequence
  Synthetic Polynucleotide
ctcatcgccccgctggatgacgg

SEQ ID NO: 1721 - DNA, 23 bp, Artificial Sequence
  Synthetic Polynucleotide
acaggacggtacttacgtctggg

SEQ ID NO: 1722 - DNA, 23 bp, Artificial Sequence
  Synthetic Polynucleotide
ctccaccgtcttgtctgagctgg

SEQ ID NO: 1723 - DNA, 19 bp, Artificial Sequence
  Synthetic Polynucleotide
  misc_feature (1)..(19): n is a, c, g, or t
nnnnnnnnnnnnnnnnnnn

SEQ ID NO: 1724 - DNA, 23 bp, Artificial Sequence
  Synthetic Polynucleotide
actgacctcacagtaagcagcgg

SEQ ID NO: 1725 - DNA, 23 bp, Artificial Sequence
  Synthetic Polynucleotide
gtgcagactggagaatacagcgg

SEQ ID NO: 1726 - DNA, 23 bp, Artificial Sequence
  Synthetic Polynucleotide
agttagcagcgagttccccgcgg

SEQ ID NO: 1727 - DNA, 23 bp, Artificial Sequence
  Synthetic Polynucleotide
gaatacacccgagacagtggagg

SEQ ID NO: 1728 - DNA, 23 bp, Artificial Sequence
  Synthetic Polynucleotide
tctgcgcaatggacgagaggcgg

SEQ ID NO: 1729 - DNA, 23 bp, Artificial Sequence
  Synthetic Polynucleotide
ataagtctccgtgcttccggcgg

SEQ ID NO: 1730 - DNA, 23 bp, Artificial Sequence
  Synthetic Polynucleotide
actgggcgataccacagcagcgg

SEQ ID NO: 1731 - DNA, 23 bp, Artificial Sequence
  Synthetic Polynucleotide
tgcgtttcctgtccacccggagg

SEQ ID NO: 1732 - DNA, 23 bp, Artificial Sequence
  Synthetic Polynucleotide
acaggcaagcctaaatacggagg

SEQ ID NO: 1733 - DNA, 23 bp, Artificial Sequence
  Synthetic Polynucleotide
attgcagcgaaatatgcgggagg

SEQ ID NO: 1734 - DNA, 23 bp, Artificial Sequence
  Synthetic Polynucleotide
gtgaacgttcccatacagggggg

SEQ ID NO: 1735 - DNA, 23 bp, Artificial Sequence
  Synthetic Polynucleotide
tctgccaaggcggtcaccagtgg

SEQ ID NO: 1736 - DNA, 23 bp, Artificial Sequence
  Synthetic Polynucleotide
tgtgaacgttcccatacaggggg

SEQ ID NO: 1737 - DNA, 23 bp, Artificial Sequence
  Synthetic Polynucleotide
ctgtccggagattcagaaagcgg

SEQ ID NO: 1738 - DNA, 23 bp, Artificial Sequence
  Synthetic Polynucleotide
ggaccgacgtagtgaggtggcgg

SEQ ID NO: 1739 - DNA, 23 bp, Artificial Sequence
  Synthetic Polynucleotide
ggcaagcctaaatacggaggggg

SEQ ID NO: 1740 - DNA, 23 bp, Artificial Sequence
  Synthetic Polynucleotide
gcgcagacaaaagcctcccgtgg

SEQ ID NO: 1741 - DNA, 23 bp, Artificial Sequence
  Synthetic Polynucleotide
attttctgctgtttggcaggcgg

SEQ ID NO: 1742 - DNA, 23 bp, Artificial Sequence
  Synthetic Polynucleotide
tatcccaaggctccggaaggggg

SEQ ID NO: 1743 - DNA, 23 bp, Artificial Sequence
  Synthetic Polynucleotide
cgggcatgcccggaagacagcgg

SEQ ID NO: 1744 - DNA, 23 bp, Artificial Sequence
  Synthetic Polynucleotide
aaagagaatcgccaactcagcgg

SEQ ID NO: 1745 - DNA, 23 bp, Artificial Sequence
  Synthetic Polynucleotide
tccatctttggtataggtggggg

SEQ ID NO: 1746 - DNA, 23 bp, Artificial Sequence
  Synthetic Polynucleotide
gccattggagagcctggccgcgg

SEQ ID NO: 1747 - DNA, 23 bp, Artificial Sequence
  Synthetic Polynucleotide
cgcaatgatgatgacgccagtgg

SEQ ID NO: 1748 - DNA, 23 bp, Artificial Sequence
  Synthetic Polynucleotide
gtcgctgaaaaacaaggcattgg

SEQ ID NO: 1749 - DNA, 23 bp, Artificial Sequence
  Synthetic Polynucleotide
tcaggacaaaaagccaaagtcgg

SEQ ID NO: 1750 - DNA, 23 bp, Artificial Sequence
  Synthetic Polynucleotide
accgaatacacccgagacagtgg

SEQ ID NO: 1751 - DNA, 23 bp, Artificial Sequence
  Synthetic Polynucleotide
gtaaatcatcgggacaacgcagg

SEQ ID NO: 1752 - DNA, 23 bp, Artificial Sequence
  Synthetic Polynucleotide
tatttggcgagtcgaggaaaggg

SEQ ID NO: 1753 - DNA, 23 bp, Artificial Sequence
  Synthetic Polynucleotide
gcacttttttgtattccaggcgg

SEQ ID NO: 1754 - DNA, 23 bp, Artificial Sequence
  Synthetic Polynucleotide
tgatccctcaggagtccaggcgg

SEQ ID NO: 1755 - DNA, 23 bp, Artificial Sequence
  Synthetic Polynucleotide
tcaatggtgctagttatctgcgg

SEQ ID NO: 1756 - DNA, 23 bp, Artificial Sequence
  Synthetic Polynucleotide
ctgccgccacctcactacgtcgg

SEQ ID NO: 1757 - DNA, 23 bp, Artificial Sequence
  Synthetic Polynucleotide
gatgaaagactcttcatgggcgg

SEQ ID NO: 1758 - DNA, 23 bp, Artificial Sequence
  Synthetic Polynucleotide
ttatttggcgagtcgaggaaagg

SEQ ID NO: 1759 - DNA, 23 bp, Artificial Sequence
  Synthetic Polynucleotide
ggaggcttttgtctgcgcaatgg

SEQ ID NO: 1760 - DNA, 23 bp, Artificial Sequence
  Synthetic Polynucleotide
tgctgcaccttagagaacgatgg

SEQ ID NO: 1761 - DNA, 23 bp, Artificial Sequence
  Synthetic Polynucleotide
actgacaggggaatactacgtgg

SEQ ID NO: 1762 - DNA, 23 bp, Artificial Sequence
  Synthetic Polynucleotide
accatccgttattcagcacgtgg

SEQ ID NO: 1763 - DNA, 23 bp, Artificial Sequence
  Synthetic Polynucleotide
ggaaggtggactcggggtgacgg

SEQ ID NO: 1764 - DNA, 23 bp, Artificial Sequence
  Synthetic Polynucleotide
gtgggggtcacatccacacttgg

SEQ ID NO: 1765 - DNA, 23 bp, Artificial Sequence
  Synthetic Polynucleotide
gactgggctcagagaaaggtcgg

SEQ ID NO: 1766 - DNA, 23 bp, Artificial Sequence
  Synthetic Polynucleotide
ctcggaaaaccgattccggaggg

SEQ ID NO: 1767 - DNA, 23 bp, Artificial Sequence
  Synthetic Polynucleotide
cgacgtagtgaggtggcggcagg

SEQ ID NO: 1768 - DNA, 23 bp, Artificial Sequence
  Synthetic Polynucleotide
caggcaagcctaaatacggaggg

SEQ ID NO: 1769 - DNA, 23 bp, Artificial Sequence
  Synthetic Polynucleotide
aacgttagtgatgacagcatcgg

SEQ ID NO: 1770 - DNA, 23 bp, Artificial Sequence
  Synthetic Polynucleotide
ctgcgcaatggacgagaggcggg

SEQ ID NO: 1771 - DNA, 23 bp, Artificial Sequence
  Synthetic Polynucleotide
ggcggggattgccactgacaggg

SEQ ID NO: 1772 - DNA, 23 bp, Artificial Sequence
  Synthetic Polynucleotide
agttcatcatgcccgcgcatggg

SEQ ID NO: 1773 - DNA, 23 bp, Artificial Sequence
  Synthetic Polynucleotide
actatactcgcctgggggagggg

SEQ ID NO: 1774 - DNA, 22 bp, Artificial Sequence
  Synthetic Polynucleotide
  misc_feature (1)..(22): n is a, c, g, or t
nnnnnnnnnnnnnnnnnnnnnn

SEQ ID NO: 1775 - DNA, 20 bp, Artificial Sequence
  Synthetic Polynucleotide
gagtagcagctcacataact

SEQ ID NO: 1776 - DNA, 20 bp, Artificial Sequence
  Synthetic Polynucleotide
caggacaagtactccaaaag

SEQ ID NO: 1777 - DNA, 20 bp, Artificial Sequence
  Synthetic Polynucleotide
actccgtcagctcgttagaa

SEQ ID NO: 1778 - DNA, 20 bp, Artificial Sequence
  Synthetic Polynucleotide
cctgggaatcatcaaggagt

SEQ ID NO: 1779 - DNA, 20 bp, Artificial Sequence
  Synthetic Polynucleotide
cttcaagtttgtcgtcgtcg

SEQ ID NO: 1780 - DNA, 20 bp, Artificial Sequence
  Synthetic Polynucleotide
gggtccgtgctgtcccatgg

SEQ ID NO: 1781 - DNA, 20 bp, Artificial Sequence
  Synthetic Polynucleotide
acacactcgatgtcactcca

SEQ ID NO: 1782 - DNA, 20 bp, Artificial Sequence
  Synthetic Polynucleotide
agcctgtaaccggtgcacag

SEQ ID NO: 1783 - DNA, 20 bp, Artificial Sequence
  Synthetic Polynucleotide
aggtggacacaatccctctg

SEQ ID NO: 1784 - DNA, 20 bp, Artificial Sequence
  Synthetic Polynucleotide
tgtgccggaagtgccgcaca

SEQ ID NO: 1785 - DNA, 20 bp, Artificial Sequence
  Synthetic Polynucleotide
agatactcacgatctcattg

SEQ ID NO: 1786 - DNA, 20 bp, Artificial Sequence
  Synthetic Polynucleotide
tgcagccgtagtcttgattg

SEQ ID NO: 1787 - DNA, 15 bp, Artificial Sequence
  Synthetic Polynucleotide
  misc_feature (1)..(15): n is a, c, g, or t
nnnnnnnnnnnnnnn

SEQ ID NO: 1788 - DNA, 15 bp, Artificial Sequence
  Synthetic Polynucleotide
  misc_feature (1)..(15): n is a, c, g, or t
nnnnnnnnnnnnnnn

SEQ ID NO: 1789 - DNA, 15 bp, Artificial Sequence
  Synthetic Polynucleotide
  misc_feature (1)..(15): n is a, c, g, or t
nnnnnnnnnnnnnnn

SEQ ID NO: 1790 - protein, 1124 aa, Homo sapiens
MAPPSEETPLIPQRSCSLLSTEAGALHVLLPARGPGPPQRLSFSFGDHLAEDLCVQAAKASGILPVYHSLFALATEDLSCWFPPSHIFSVEDASTQVLLYRIRFYFPNWFGLEKCHRFGLRKDLASAILDLPVLEHLFAQHRSDLVSGRLPVGLSLKEQGECLSLAVLDLARMAREQAQRPGELLKTVSYKACLPPSLRDLIQGLSFVTRRRIRRTVRRALRRVAACQADRHSLMAKYIMDLERLDPAGAAETFHVGLPGALGGHDGLGLLRVAGDGGIAWTQGEQEVLQPFCDFPEIVDISIKQAPRVGPAGEHRLVTVTRTDNQILEAEFPGLPEALSFVALVDGYFRLTTDSQHFFCKEVAPPRLLEEVAEQCHGPITLDFAINKLKTGGSRPGSYVLRRSPQDFDSFLLTVCVQNPLGPDYKGCLIRRSPTGTFLLVGLSRPHSSLRELLATCWDGGLHVDGVAVTLTSCCIPRPKEKSNLIVVQRGHSPPTSSLVQPQSQYQLSQMTFHKIPADSLEWHENLGHGSFTKIYRGCRHEVVDGEARKTEVLLKVMDAKHKNCMESFLEAASLMSQVSYRHLVLLHGVCMAGDSTMVQEFVHLGAIDMYLRKRGHLVPASWKLQVVKQLAYALNYLEDKGLPHGNVSARKVLLAREGADGSPPFIKLSDPGVSPAVLSLEMLTDRIPWVAPECLREAQTLSLEADKWGFGATVWEVFSGVTMPISALDPAKKLQFYEDRQQLPAPKWTELALLIQQCMAYEPVQRPSFRAVIRDLNSLISSDYELLSDPTPGALAPRDGLWNGAQLYACQDPTIFEERHLKYISQLGKGNFGSVELCRYDPLGDNTGALVAVKQLQHSGPDQQRDFQREIQILKALHSDFIVKYRGVSYGPGRQSLRLVMEYLPSGCLRDFLQRHRARLDASRLLLYSSQICKGMEYLGSRRCVHRDLAARNILVESEAHVKIADFGLAKLLPLDKDYYVVREPGQSPIFWYAPESLSDNIFSRQSDVWSFGVVLYELFTYCDKSCSPSAEFLRMMGCERDVPALCRLLELLEEGQRLPAPPACPAEVHELMKLCWAPSPQDRPSFSALGPQLDMLWSGSRGCETHAFTAHPEGKHHSLSFS

SEQ ID NO: 1791 - protein, 1124 aa, Homo sapiens
MAPPSEETPLIPQRSCSLLSTEAGALHVLLPARGPGPPQRLSFSFGDHLAEDLCVQAAKASGILPVYHSLFALATEDLSCWFPPSHIFSVEDASTQVLLYRIRFYFPNWFGLEKCHRFGLRKDLASAILDLPVLEHLFAQHRSDLVSGRLPVGLSLKEQGECLSLAVLDLARMAREQAQRPGELLKTVSYKACLPPSLRDLIQGLSFVTRRRIRRTVRRALRRVAACQADRHSLMAKYIMDLERLDPAGAAETFHVGLPGALGGHDGLGLLRVAGDGGIAWTQGEQEVLQPFCDFPEIVDISIKQAPRVGPAGEHRLVTVTRTDNQILEAEFPGLPEALSFVALVDGYFRLTTDSQHFFCKEVAPPRLLEEVAEQCHGPITLDFAINKLKTGGSRPGSYVLRRSPQDFDSFLLTVCVQNPLGPDYKGCLIRRSPTGTFLLVGLSRPHSSLRELLATCWDGGLHVDGVAVTLTSCCIPRPKEKSNLIVVQRGHSPPTSSLVQPQSQYQLSQITFHKIPADSLEWHENLGHGSFTKIYRGCRHEVVDGEARKTEVLLKVMDAKHKNCMESFLEAASLMSQVSYRHLVLLHGVCMAGDSTMVQEFVHLGAIDMYLRKRGHLVPASWKLQVVKQLAYALNYLEDKGLPHGNVSARKVLLAREGADGSPPFIKLSDPGVSPAVLSLEMLTDRIPWVAPECLREAQTLSLEADKWGFGATVWEVFSGVTMPISALDPAKKLQFYEDRQQLPAPKWTELALLIQQCMAYEPVQRPSFRAVIRDLNSLISSDYELLSDPTPGALAPRDGLWNGAQLYACQDPTIFEERHLKYISQLGKGNFGSVELCRYDPLGDNTGALVAVKQLQHSGPDQQRDFQREIQILKALHSDFIVKYRGVSYGPGRQSLRLVMEYLPSGCLRDFLQRHRARLDASRLLLYSSQICKGMEYLGSRRCVHRDLAARNILVESEAHVKIADFGLAKLLPLDKDYYVVREPGQSPIFWYAPESLSDNIFSRQSDVWSFGVVLYELFTYCDKSCSPSAEFLRMMGCERDVPALCRLLELLEEGQRLPAPPACPAEVHELMKLCWAPSPQDRPSFSALGPQLDMLWSGSRGCETHAFTAHPEGKHHSLSFS

SEQ ID NO: 1792 - protein, 1124 aa, Homo sapiens
MAPPSEETPLIPQRSCSLLSTEAGALHVLLPARGPGPPQRLSFSFGDHLAEDLCVQAAKASGILPVYHSLFALATEDLSCWFPPSHIFSVEDASTQVLLYRIRFYFPNWFGLEKCHRFGLRKDLASAILDLPVLEHLFAQHRSDLVSGRLPVGLSLKEQGECLSLAVLDLARMAREQAQRPGELLKTVSYKACLPPSLRDLIQGLSFVTRRRIRRTVRRALRRVAACQADRHSLMAKYIMDLERLDPAGAAETFHVGLPGALGGHDGLGLLRVAGDGGIAWTQGEQEVLQPFCDFPEIVDISIKQAPRVGPAGEHRLVTVTRTDNQILEAEFPGLPEALSFVALVDGYFRLTTDSQHFFCKEVAPPRLLEEVAEQCHGPITLDFAINKLKTGGSRPGSYVLRRSPQDFDSFLLTVCVQNPLGPDYKGCLIRRSPTGTFLLVGLSRPHSSLRELLATCWDGGLHVDGVAVTLTSCCIPRPKEKSNLIVVQRGHSPPTSSLVQPQSQYQLSQMTFHKIPADSLEWHENLGHGSFTKIYRGCRHEVVDGEARKTEVLLKVMDAKHKNCMESFLEAVSLMSQVSYRHLVLLHGVCMAGDSTMVQEFVHLGAIDMYLRKRGHLVPASWKLQVVKQLAYALNYLEDKGLPHGNVSARKVLLAREGADGSPPFIKLSDPGVSPAVLSLEMLTDRIPWVAPECLREAQTLSLEADKWGFGATVWEVFSGVTMPISALDPAKKLQFYEDRQQLPAPKWTELALLIQQCMAYEPVQRPSFRAVIRDLNSLISSDYELLSDPTPGALAPRDGLWNGAQLYACQDPTIFEERHLKYISQLGKGNFGSVELCRYDPLGDNTGALVAVKQLQHSGPDQQRDFQREIQILKALHSDFIVKYRGVSYGPGRQSLRLVMEYLPSGCLRDFLQRHRARLDASRLLLYSSQICKGMEYLGSRRCVHRDLAARNILVESEAHVKIADFGLAKLLPLDKDYYVVREPGQSPIFWYAPESLSDNIFSRQSDVWSFGVVLYELFTYCDKSCSPSAEFLRMMGCERDVPALCRLLELLEEGQRLPAPPACPAEVHELMKLCWAPSPQDRPSFSALGPQLDMLWSGSRGCETHAFTAHPEGKHHSLSFS

SEQ ID NO: 1793 - protein, 1124 aa, Homo sapiens
MAPPSEETPLIPQRSCSLLSTEAGALHVLLPARGPGPPQRLSFSFGDHLAEDLCVQAAKASGILPVYHSLFALATEDLSCWFPPSHIFSVEDASTQVLLYRIRFYFPNWFGLEKCHRFGLRKDLASAILDLPVLEHLFAQHRSDLVSGRLPVGLSLKEQGECLSLAVLDLARMAREQAQRPGELLKTVSYKACLPPSLRDLIQGLSFVTRRRIRRTVRRALRRVAACQADRHSLMAKYIMDLERLDPAGAAETFHVGLPGALGGHDGLGLLRVAGDGGIAWTQGEQEVLQPFCDFPEIVDISIKQAPRVGPAGEHRLVTVTRTDNQILEAEFPGLPEALSFVALVDGYFRLTTDSQHFFCKEVAPPRLLEEVAEQCHGPITLDFAINKLKTGGSRPGSYVLRRSPQDFDSFLLTVCVQNPLGPDYKGCLIRRSPTGTFLLVGLSRPHSSLRELLATCWDGGLHVDGVAVTLTSCCIPRPKEKSNLIVVQRGHSPPTSSLVQPQSQYQLSQMTFHKIPADSLEWHENLGHGSFTKIYRGCRHEVVDGEARKTEVLLKVMDAKHKNCMESFLEAASLMSQVSYRHLVLLHGVCMAGDSTMVQEFVHLGAIDMYLRKRGHLVPASWKLQVVKQLAYALNYLEDKGLPHGNVSARKVLLAWEGADGSPPFIKLSDPGVSPAVLSLEMLTDRIPWVAPECLREAQTLSLEADKWGFGATVWEVFSGVTMPISALDPAKKLQFYEDRQQLPAPKWTELALLIQQCMAYEPVQRPSFRAVIRDLNSLISSDYELLSDPTPGALAPRDGLWNGAQLYACQDPTIFEERHLKYISQLGKGNFGSVELCRYDPLGDNTGALVAVKQLQHSGPDQQRDFQREIQILKALHSDFIVKYRGVSYGPGRQSLRLVMEYLPSGCLRDFLQRHRARLDASRLLLYSSQICKGMEYLGSRRCVHRDLAARNILVESEAHVKIADFGLAKLLPLDKDYYVVREPGQSPIFWYAPESLSDNIFSRQSDVWSFGVVLYELFTYCDKSCSPSAEFLRMMGCERDVPALCRLLELLEEGQRLPAPPACPAEVHELMKLCWAPSPQDRPSFSALGPQLDMLWSGSRGCETHAFTAHPEGKHHSLSFS

SEQ ID NO: 1794 - protein, 1124 aa, Homo sapiens
MAPPSEETPLIPQRSCSLLSTEAGALHVLLPARGPGPPQRLSFSFGDHLAEDLCVQAAKASGILPVYHSLFALATEDLSCWFPPSHIFSVEDASTQVLLYRIRFYFPNWFGLEKCHRFGLRKDLASAILDLPVLEHLFAQHRSDLVSGRLPVGLSLKEQGECLSLAVLDLARMAREQAQRPGELLKTVSYKACLPPSLRDLIQGLSFVTRRRIRRTVRRALRRVAACQADRHSLMAKYIMDLERLDPAGAAETFHVGLPGALGGHDGLGLLRVAGDGGIAWTQGEQEVLQPFCDFPEIVDISIKQAPRVGPAGEHRLVTVTRTDNQILEAEFPGLPEALSFVALVDGYFRLTTDSQHFFCKEVAPPRLLEEVAEQCHGPITLDFAINKLKTGGSRPGSYVLRRSPQDFDSFLLTVCVQNPLGPDYKGCLIRRSPTGTFLLVGLSRPHSSLRELLATCWDGGLHVDGVAVTLTSCCIPRPKEKSNLIVVQRGHSPPTSSLVQPQSQYPLSQMTFHKIPADSLEWHENLGHGSFTKIYRGCRHEVVDGEARKTEVLLKVMDAKHKNCMESFLEAASLMSQVSYRHLVLLHGVCMAGDSTMVQEFVHLGAIDMYLRKRGHLVPASWKLQVVKQLAYALNYLEDKGLPHGNVSARKVLLAREGADGSPPFIKLSDPGVSPAVLSLEMLTDRIPWVAPECLREAQTLSLEADKWGFGATVWEVFSGVTMPISALDPAKKLQFYEDRQQLPAPKWTELALLIQQCMAYEPVQRPSFRAVIRDLNSLISSDYELLSDPTPGALAPRDGLWNGAQLYACQDPTIFEERHLKYISQLGKGNFGSVELCRYDPLGDNTGALVAVKQLQHSGPDQQRDFQREIQILKALHSDFIVKYRGVSYGPGRQSLRLVMEYLPSGCLRDFLQRHRARLDASRLLLYSSQICKGMEYLGSRRCVHRDLAARNILVESEAHVKIADFGLAKLLPLDKDYYVVREPGQSPIFWYAPESLSDNIFSRQSDVWSFGVVLYELFTYCDKSCSPSAEFLRMMGCERDVPALCRLLELLEEGQRLPAPPACPAEVHELMKLCWAPSPQDRPSFSALGPQLDMLWSGSRGCETHAFTAHPEGKHHSLSFS

SEQ ID NO: 1795 - protein, 1124 aa, Homo sapiens
MAPPSEETPLIPQRSCSLLSTEAGALHVLLPARGPGPPQRLSFSFGDHLAEDLCVQAAKASGILPVYHSLFALATEDLSCWFPPSHIFSVEDASTQVLLYRIRFYFPNWFGLEKCHRFGLRKDLASAILDLPVLEHLFAQHRSDLVSGRLPVGLSLKEQGECLSLAVLDLARMAREQAQRPGELLKTVSYKACLPPSLRDLIQGLSFVTRRRIRRTVRRALRRVAACQADRHSLMAKYIMDLERLDPAGAAETFHVGLPGALGGHDGLGLLRVAGDGGIAWTQGEQEVLQPFCDFPEIVDISIKQAPRVGPAGEHRLVTVTRTDNQILEAEFPGLPEALSFVALVDGYFRLTTDSQHFFCKEVAPPRLLEEVAEQCHGPITLDFAINKLKTGGSRPGSYVLRRSPQDFDSFLLTVCVQNPLGPDYKGCLIRRSPTGTFLLVGLSRPHSSLRELLATCWDGGLHVDGVAVTLTSCCIPRPKEKSNLIVVQRSHSPPTSSLVQPQSQYQLSQMTFHKIPADSLEWHENLGHGSFTKIYRGCRHEVVDGEARKTEVLLKVMDAKHKNCMESFLEAASLMSQVSYRHLVLLHGVCMAGDSTMVQEFVHLGAIDMYLRKRGHLVPASWKLQVVKQLAYALNYLEDKGLPHGNVSARKVLLAREGADGSPPFIKLSDPGVSPAVLSLEMLTDRIPWVAPECLREAQTLSLEADKWGFGATVWEVFSGVTMPISALDPAKKLQFYEDRQQLPAPKWTELALLIQQCMAYEPVQRPSFRAVIRDLNSLISSDYELLSDPTPGALAPRDGLWNGAQLYACQDPTIFEERHLKYISQLGKGNFGSVELCRYDPLGDNTGALVAVKQLQHSGPDQQRDFQREIQILKALHSDFIVKYRGVSYGPGRQSLRLVMEYLPSGCLRDFLQRHRARLDASRLLLYSSQICKGMEYLGSRRCVHRDLAARNILVESEAHVKIADFGLAKLLPLDKDYYVVREPGQSPIFWYAPESLSDNIFSRQSDVWSFGVVLYELFTYCDKSCSPSAEFLRMMGCERDVPALCRLLELLEEGQRLPAPPACPAEVHELMKLCWAPSPQDRPSFSALGPQLDMLWSGSRGCETHAFTAHPEGKHHSLSFS

SEQ ID NO: 1796 - protein, 1124 aa, Homo sapiens
MAPPSEETPLIPQRSCSLLSTEAGALHVLLPARGPGPPQRLSFSFGDHLAEDLCVQAAKASGILPVYHSLFALATEDLSCWFPPSHIFSVEDASTQVLLYRIRFYFPNWFGLEKCHRFGLRKDLASAILDLPVLEHLFAQHRSDLVSGRLPVGLSLKEQGECLSLAVLDLARMAREQAQRPGELLKTVSYKACLPPSLRDLIQGLSFVTRRRIRRTVRRALRRVAACQADRHSLMAKYIMDLERLDPAGAAETFHVGLPGALGGHDGLGLLRVAGDGGIAWTQGEQEVLQPFCDFPEIVDISIKQAPRVGPAGEHRLVTVTRTDNQILEAEFPGLPEALSFVALVDGYFRLTTDSQHFFCKEVAPPRLLEEVAEQCHGPITLDFAINKLKTGGSRPGSYVLRRSPQDFDSFLLTVCVQNPLGPDYKGCLIRRSPTGTFLLVGLSRPHSSLRELLATCWDGGLHVDGVAVTLTSCCIPRPKEKSNLIVVQRGHSPPTSSLVQPQSQYQLSQMTFHKIPADSLEWHENLGHGSFTKIYRGCRHEVVDGEARKTEVLLKVMDAKHKNCMESFLEAASLMSQVSYRHLVLLHGVCMAGDSTMVQEFVHLGAIDMYLRKRGHLVPASWKLQVVKQLAYALNYLEDKGLPHGNVSARKVLLAREGADGSPPFIKLSDPGASPAVLSLEMLTDRIPWVAPECLREAQTLSLEADKWGFGATVWEVFSGVTMPISALDPAKKLQFYEDRQQLPAPKWTELALLIQQCMAYEPVQRPSFRAVIRDLNSLISSDYELLSDPTPGALAPRDGLWNGAQLYACQDPTIFEERHLKYISQLGKGNFGSVELCRYDPLGDNTGALVAVKQLQHSGPDQQRDFQREIQILKALHSDFIVKYRGVSYGPGRQSLRLVMEYLPSGCLRDFLQRHRARLDASRLLLYSSQICKGMEYLGSRRCVHRDLAARNILVESEAHVKIADFGLAKLLPLDKDYYVVREPGQSPIFWYAPESLSDNIFSRQSDVWSFGVVLYELFTYCDKSCSPSAEFLRMMGCERDVPALCRLLELLEEGQRLPAPPACPAEVHELMKLCWAPSPQDRPSFSALGPQLDMLWSGSRGCETHAFTAHPEGKHHSLSFS

SEQ ID NO: 1797 - protein, 1124 aa, Homo sapiens
MAPPSEETPLIPQRSCSLLSTEAGALHVLLPARGPGPPQRLSFSFGDHLAEDLCVQAAKASGILPVYHSLFALATEDLSCWFPPSHIFSVEDASTQVLLYRIRFYFPNWFGLEKCHRFGLRKDLASAILDLPVLEHLFAQHRSDLVSGRLPVGLSLKEQGECLSLAVLDLARMAREQAQRPGELLKTVSYKACLPPSLRDLIQGLSFVTRRRIRRTVRRALRRVAACQADRHSLMAKYIMDLERLDPAGAAETFHVGLPGALGGHDGLGLLRVAGDGGIAWTQGEQEVLQPFCDFPEIVDISIKQAPRVGPAGEHRLVTVTRTDNQILEAEFPGLPEALSFVALVDGYFRLTTDSQHFFCKEVAPPRLLEEVAEQCHGPITLDFAINKLKTGGSRPGSYVLRRSPQDFDSFLLTVCVQNPLGPDYKGCLIRRSPTGTFLLVGLSRPHSSLRELLATCWDGGLHVDGVAVTLTSCCIPRPKEKSNLIVVQRGHSPPTSSLVQPQSQYQLSQMTFHKIPADSLEWHENLGHGSFTKIYRGCRHEVVDGEARKTEVLLKVMDAKHKNCMESFLEAASLMSQVSYRHLVLLHGVCMAGDSTMVQEFVHLGAIDMYLRKRGHLVPASWKLQVVKQLAYALNYLEDKGLPHGNVSARKVLLAREGADGSPPFIKLSDPGVSPALLSLEMLTDRIPWVAPECLREAQTLSLEADKWGFGATVWEVFSGVTMPISALDPAKKLQFYEDRQQLPAPKWTELALLIQQCMAYEPVQRPSFRAVIRDLNSLISSDYELLSDPTPGALAPRDGLWNGAQLYACQDPTIFEERHLKYISQLGKGNFGSVELCRYDPLGDNTGALVAVKQLQHSGPDQQRDFQREIQILKALHSDFIVKYRGVSYGPGRQSLRLVMEYLPSGCLRDFLQRHRARLDASRLLLYSSQICKGMEYLGSRRCVHRDLAARNILVESEAHVKIADFGLAKLLPLDKDYYVVREPGQSPIFWYAPESLSDNIFSRQSDVWSFGVVLYELFTYCDKSCSPSAEFLRMMGCERDVPALCRLLELLEEGQRLPAPPACPAEVHELMKLCWAPSPQDRPSFSALGPQLDMLWSGSRGCETHAFTAHPEGKHHSLSFS

SEQ ID NO: 1798 - protein, 786 aa, Homo sapiens
MAMWIQAQQLQGDALHQMQALYGQHFPIEVRHYLSQWIESQAWDSIDLDNPQENIKATQLLEGLVQELQKKAEHQVGEDGFLLKIKLGHYATQLQSTYDRCPMELVRCIRHILYNEQRLVREANNGSSPAGSLADAMSQKHLQINQTFEELRLITQDTENELKKLQQTQEYFIIQYQESLRIQAQFAQLGQLNPQERMSRETALQQKQVSLETWLQREAQTLQQYRVELAEKHQKTLQLLRKQQTIILDDELIQWKRRQQLAGNGGPPEGSLDVLQSWCEKLAEIIWQNRQQIRRAEHLCQQLPIPGPVEEMLAEVNATITDIISALVTSTFIIEKQPPQVLKTQTKFAATVRLLVGGKLNVHMNPPQVKATIISEQQAKSLLKNENTRNDYSGEILNNCCVMEYHQATGTLSAHFRNMSLKRIKRSDRRGAESVTEEKFTILFDSQFSVGGNELVFQVKTLSLPVVVIVHGSQDNNATATVLWDNAFAEPGRVPFAVPDKVLWPQLCEALNMKFKAEVQSNRGLTKENLVFLAQKLFNISSNHLEDYNSMSVSWSQFNRENLPGRNYTFWQWFDGVMEVLKKHLKPHWNDGAILGFVNKQQAHDLLINKPDGTFLLRFSDSEIGGITIAWKFDSQERMFWNLMPFTTRDFSIRSLADRLGDLNYLIYVFPDRPKDEVYSKYYTPVPCEPATAKAADGYVKPQIKQVVPEFANASTDAGSGATYMDQAPSPVVCPQAHYNMYPPNPDSVLDTDGDFDLEDTMDVARRVEELLGRPMDSQWIPHAQS

SEQ ID NO: 1799 - protein, 786 aa, Homo sapiens
MAMWIQAQQLQGDALHQMQALYGQHFPIEVRHYLSQWIESQAWDSIDLDNPQENIKATQLLEGLVQELQKKAEHQVGEDGFLLKIKLGHYATQLQSTYDRCPMELVRCIRHILYNEQRLVREANNGSSPAGSLADAMSQKHLQINQTFEELRLITQDTENELKKLQQTQEYFIIQYQESLRIQAQFAQLGQLNPQERMSRETALQQKQVSLETWLQREAQTLQQYRVELAEKHQKTLQLLRKQQTIILDDELIQWKRRQQLAGNGGPPEGSLDVLQSWCEKLAEIIWQNRQQIRRAEHLCQQLPIPGPVEEMLAEVNATITDIISALVTSTFIIEKQPPQVLKTQTKFAATVRLLVGGKLNVHMNPPQVKATIISEQQAKSLLKNENTRNDYSGEILNNCCVMEYHQATGTLSAHFRNMSLKRIKRSDRRGAESVTEEKFTILFDSQFSVGGNELVFQVKTLSLPVVVIVHGSQDNNATATVLWDNAFAEPGRVPFAVPDKVLWPQLCEALNMKFKAEVQSNRGLTKENLVFLAQKLFNISSNHLEDYNSMSVSWSQFNRENLPGRNYTFWQWFDGVMEVLKKHLKPHWNDGAILGFVNKQQAHDLLINKPDGTFLLRFSDSEIGGISIAWKFDSQERMFWNLMPFTTRDFSIRSLADRLGDLNYLIYVFPDRPKDEVYSKYYTPVPCEPATAKAADGYVKPQIKQVVPEFANASTDAGSGATYMDQAPSPVVCPQAHYNMYPPNPDSVLDTDGDFDLEDTMDVARRVEELLGRPMDSQWIPHAQS

SEQ ID NO: 1800 - protein, 786 aa, Homo sapiens
MAMWIQAQQLQGDALHQMQALYGQHFPIEVRHYLSQWIESQAWDSIDLDNPQENIKATQLLEGLVQELQKKAEHQVGEDGFLLKIKLGHYATQLQSTYDRCPMELVRCIRHILYNEQRLVREANNGSSPAGSLADAMSQKHLQINQTFEELRLITQDTENELKKLQQTQEYFIIQYQESLRIQAQFAQLGQLNPQERMSRETALQQKQVSLETWLQREAQTLQQYRVELAEKHQKTLQLLRKQQTIILDDELIQWKRRQQLAGNGGPPEGSLDVLQSWCEKLAEIIWQNRQQIRRAEHLCQQLPIPGPVEEMLAEVNATITDIISALVTSTFIIEKQPPQVLKTQTKFAATVRLLVGGKLNVHMNPPQVKATIISEQQAKSLLKNENTRNDYSGEILNNCCVMEYHQATGTLSAHFRNMSLKRIKRSDRRGAESVTEEKFTILFDSQFSVGGNELVFQVKTLSLPVVVIVHGSQDNNATATVLWDNAFAEPGRVPFAVPDKVLWPQLCEALNMKFKAEVQSNRGLTKENLVFLAQKLFNISSNHLEDYNSMSVSWSQFNRENLPGRNYTFWQWFDGVMEVLKKHLKPHWNDGAILGFVNKQQAHDLLINKPDGTFLLRFSDSEIGGITIAWKFDSQERMFWHLMPFTTRDFSIRSLADRLGDLNYLIYVFPDRPKDEVYSKYYTPVPCEPATAKAADGYVKPQIKQVVPEFANASTDAGSGATYMDQAPSPVVCPQAHYNMYPPNPDSVLDTDGDFDLEDTMDVARRVEELLGRPMDSQWIPHAQS

SEQ ID NO: 1801 - protein, 786 aa, Homo sapiens
MAMWIQAQQLQGDALHQMQALYGQHFPIEVRHYLSQWIESQAWDSIDLDNPQENIKATQLLEGLVQELQKKAEHQVGEDGFLLKIKLGHYATQLQSTYDRCPMELVRCIRHILYNEQRLVREANNGSSPAGSLADAMSQKHLQINQTFEELRLITQDTENELKKLQQTQEYFIIQYQESLRIQAQFAQLGQLNPQERMSRETALQQKQVSLETWLQREAQTLQQYRVELAEKHQKTLQLLRKQQTIILDDELIQWKRRQQLAGNGGPPEGSLDVLQSWCEKLAEIIWQNRQQIRRAEHLCQQLPIPGPVEEMLAEVNATITDIISALVTSTFIIEKQPPQVLKTQTKFAATVRLLVGGKLNVHMNPPQVKATIISEQQAKSLLKNENTRNDYSGEILNNCCVMEYHQATGTLSAHFRNMSLKRIKRSDRRGAESVTEEKFTILFDSQFSVGGNELVFQVKTLSLPVVVIVHGSQDNNATATVLWDNAFAEPGRVPFAVPDKVLWPQLCEALNMKFKAEVQSNRGLTKENLVFLAQKLFNISSNHLEDYNSMSVSWSQFNRENLPGRNYTFWQWFDGVMEVLKKHLKPHWNDGAILGFVNKQQAHDLLINKPDGTFLLRFSDSEIGGITIAWKFDSQERMFWNLMPFTTRDFSIRSLADRLGDLNFLIYVFPDRPKDEVYSKYYTPVPCEPATAKAADGYVKPQIKQVVPEFANASTDAGSGATYMDQAPSPVVCPQAHYNMYPPNPDSVLDTDGDFDLEDTMDVARRVEELLGRPMDSQWIPHAQS

SEQ ID NO: 1802 - protein, 786 aa, Homo sapiens
MAMWIQAQQLQGDALHQMQALYGQHFPIEVRHYLSQWIESQAWDSIDLDNPQENIKATQLLEGLVQELQKKAEHQVGEDGFLLKIKLGHYATQLQSTYDRCPMELVRCIRHILYNEQRLVREANNGSSPAGSLADAMSQKHLQINQTFEELRLITQDTENELKKLQQTQEYFIIQYQESLRIQAQFAQLGQLNPQERMSRETALQQKQVSLETWLQREAQTLQQYRVELAEKHQKTLQLLRKQQTIILDDELIQWKRRQQLAGNGGPPEGSLDVLQSWCEKLAEIIWQNRQQIRRAEHLCQQLPIPGPVEEMLAEVNATITDIISALVTSTFIIEKQPPQVLKTQTKFAATVRLLVGGKLNVHMNPPQVKATIISEQQAKSLLKNENTRNDYSGEILNNCCVMEYHQATGTLSAHFRNMSLKRIKRSDRRGAESVTEEKFTILFDSQFSVGGNELVFQVKTLSLPVVVIVHGSQDNNATATVLWDNAFAEPGRVPFAVPDKVLWPQLCEALNMKFKAEVQSNRGLTKENLVFLAQKLFNISSNHLEDYNSMSVSWSQFNRENLPGRNYTFWQWFDGVMEVLKKHLKPHWNDGAILGFVNKQQAHDLLINKPDGTFLLRFSDSEIGGITIAWKFDSQERMFWNLMPFTTRDFSIRSLADRLGDLNYLIYVFPDRPKDEVYSKYYTPVPCEPATAKAADGYVKPQIKLVVPEFANASTDAGSGATYMDQAPSPVVCPQAHYNMYPPNPDSVLDTDGDFDLEDTMDVARRVEELLGRPMDSQWIPHAQS

SEQ ID NO: 1803 - protein, 786 aa, Homo sapiens
MAMWIQAQQLQGDALHQMQALYGQHFPIEVRHYLSQWIESQAWDSIDLDNPQENIKATQLLEGLVQELQKKAEHQVGEDGFLLKIKLGHYATQLQSTYDRCPMELVRCIRHILYNEQRLVREANNGSSPAGSLADAMSQKHLQINQTFEELRLITQDTENELKKLQQTQEYFIIQYQESLRIQAQFAQLGQLNPQERMSRETALQQKQVSLETWLQREAQTLQQYRVELAEKHQKTLQLLRKQQTIILDDELIQWKRRQQLAGNGGPPEGSLDVLQSWCEKLAEIIWQNRQQIRRAEHLCQQLPIPGPVEEMLAEVNATITDIISALVTSTFIIEKQPPQVLKTQTKFAATVRLLVGGKLNVHMNPPQVKATIISEQQAKSLLKNENTRNDYSGEILNNCCVMEYHQATGTLSAHFRNMSLKRIKRSDRRGAESVTEEKFTILFDSQFSVGGNELVFQVKTLSLPVVVIVHGSQDNNATATVLWDNAFAEPGRVPFAVPDKVLWPQLCEALNMKFKAEVQSNRGLTKENLVFLAQKLFNISSNHLEDYNSMSVSWSQFNRENLPGRNYTFWQWFDGVMEVLKKHLKPHWNDGAILGFVNKQQAHDLLINKPDGTFLLRFSDSEIGGITIAWKFDSQERMFWNLMPFTTRDFSIRSLADCLGDLNYLIYVFPDRPKDEVYSKYYTPVPCEPATAKAADGYVKPQIKQVVPEFANASTDAGSGATYMDQAPSPVVCPQAHYNMYPPNPDSVLDTDGDFDLEDTMDVARRVEELLGRPMDSQWIPHAQS

SEQ ID NO: 1804 - protein, 1154 aa, Homo sapiens
MQYLNIKEDCNAMAFCAKMRSSKKTEVNLEAPEPGVEVIFYLSDREPLRLGSGEYTAEELCIRAAQACRISPLCHNLFALYDENTKLWYAPNRTITVDDKMSLRLHYRMRFYFTNWHGTNDNEQSVWRHSPKKQKNGYEKKKIPDATPLLDASSLEYLFAQGQYDLVKCLAPIRDPKTEQDGHDIENECLGMAVLAISHYAMMKKMQLPELPKDISYKRYIPETLNKSIRQRNLLTRMRINNVFKDFLKEFNNKTICDSSVSTHDLKVKYLATLETLTKHYGAEIFETSMLLISSENEMNWFHSNDGGNVLYYEVMVTGNLGIQWRHKPNVVSVEKEKNKLKRKKLENKHKKDEEKNKIREEWNNFSYFPEITHIVIKESVVSINKQDNKKMELKLSSHEEALSFVSLVDGYFRLTADAHHYLCTDVAPPLIVHNIQNGCHGPICTEYAINKLRQEGSEEGMYVLRWSCTDFDNILMTVTCFEKSEQVQGAQKQFKNFQIEVQKGRYSLHGSDRSFPSLGDLMSHLKKQILRTDNISFMLKRCCQPKPREISNLLVATKKAQEWQPVYPMSQLSFDRILKKDLVQGEHLGRGTRTHIYSGTLMDYKDDEGTSEEKKIKVILKVLDPSHRDISLAFFEAASMMRQVSHKHIVYLYGVCVRDVENIMVEEFVEGGPLDLFMHRKSDVLTTPWKFKVAKQLASALSYLEDKDLVHGNVCTKNLLLAREGIDSECGPFIKLSDPGIPITVLSRQECIERIPWIAPECVEDSKNLSVAADKWSFGTTLWEICYNGEIPLKDKTLIEKERFYESRCRPVTPSCKELADLMTRCMNYDPNQRPFFRAIMRDINKLEEQNPDIVSEKKPATEVDPTHFEKRFLKRIRDLGEGHFGKVELCRYDPEGDNTGEQVAVKSLKPESGGNHIADLKKEIEILRNLYHENIVKYKGICTEDGGNGIKLIMEFLPSGSLKEYLPKNKNKINLKQQLKYAVQICKGMDYLGSRQYVHRDLAARNVLVESEHQVKIGDFGLTKAIETDKEYYTVKDDRDSPVFWYAPECLMQSKFYIASDVWSFGVTLHELLTYCDSDSSPMALFLKMIGPTHGQMTVTRLVNTLKEGKRLPCPPNCPDEVYQLMRKCWEFQPSNRTSFQNLIEGFEALLK

SEQ ID NO: 1805 - protein, 1154 aa, Homo sapiens
MQYLNIKEDCNAMAFCAKMRSSKKTEVNLEAPEPGVEVIFYLSDREPLRLGSGEYTAEELCIRAAQACRISPLCHNLFALYDENTKLWYAPNRTITVDDKMSLRLHYRMRFYFTNWHGTNDNEQSVWRHSPKKQKNGYEKKKIPDATPLLDASSLEYLFAQGQYDLVKCLAPIRDPKTEQDGHDIENECLGMAVLAISHYAMMKKMQLPELPKDISYKRYIPETLNKSIRQRNLLTRMRINNVFKDFLKEFNNKTICDSSVSTHDLKVKYLATLETLTKHYGAEIFETSMLLISSENEMNWFHSNDGGNVLYYEVMVTGNLGIQWRHKPNVVSVEKEKNKLKRKKLENKHKKDEEKNKIREEWNNFSYFPEITHIVIKESVVSINKQDNKKMELKLSSHEEALSFVSLVDGYFRLTADAHHYLCTDVAPPLIVHNIQNGCHGPICTEYAINKLRQEGSEEGMYVLRWSCTDFDNILMTVTCFEKSEQVQGAQKQFKNFQIEVQKGRYSLHGSDRSFPSLGDLMSHLKKQILRTDNISFMLKRCCQPKPREISNLLVATKKAQEWQPVYPMSQLSFDRILKKDLVQGEHLGRGTRTHIYSGTLMDYKDDEGTSEEKKIKVILKVLDPSHRDISLAFFEAASMMRQVSHKHIVYLYGVCFRDVENIMVEEFVEGGPLDLFMHRKSDVLTTPWKFKVAKQLASALSYLEDKDLVHGNVCTKNLLLAREGIDSECGPFIKLSDPGIPITVLSRQECIERIPWIAPECVEDSKNLSVAADKWSFGTTLWEICYNGEIPLKDKTLIEKERFYESRCRPVTPSCKELADLMTRCMNYDPNQRPFFRAIMRDINKLEEQNPDIVSEKKPATEVDPTHFEKRFLKRIRDLGEGHFGKVELCRYDPEGDNTGEQVAVKSLKPESGGNHIADLKKEIEILRNLYHENIVKYKGICTEDGGNGIKLIMEFLPSGSLKEYLPKNKNKINLKQQLKYAVQICKGMDYLGSRQYVHRDLAARNVLVESEHQVKIGDFGLTKAIETDKEYYTVKDDRDSPVFWYAPECLMQSKFYIASDVWSFGVTLHELLTYCDSDSSPMALFLKMIGPTHGQMTVTRLVNTLKEGKRLPCPPNCPDEVYQLMRKCWEFQPSNRTSFQNLIEGFEALLK

SEQ ID NO: 1806 - protein, 1154 aa, Homo sapiens
MQYLNIKEDCNAMAFCAKMRSSKKTEVNLEAPEPGVEVIFYLSDREPLRLGSGEYTAEELCIRAAQACRISPLCHNLFALYDENTKLWYAPNRTITVDDKMSLRLHYRMRFYFTNWHGTNDNEQSVWRHSPKKQKNGYEKKKIPDATPLLDASSLEYLFAQGQYDLVKCLAPIRDPKTEQDGHDIENECLGMAVLAISHYAMMKKMQLPELPKDISYKRYIPETLNKSIRQRNLLTRMRINNVFKDFLKEFNNKTICDSSVSTHDLKVKYLATLETLTKHYGAEIFETSMLLISSENEMNWFHSNDGGNVLYYEVMVTGNLGIQWRHKPNVVSVEKEKNKLKRKKLENKHKKDEEKNKIREEWNNFSYFPEITHIVIKESVVSINKQDNKKMELKLSSHEEALSFVSLVDGYFRLTADAHHYLCTDVAPPLIVHNIQNGCHGPICTEYAINKLRQEGSEEGMYVLRWSCTDFDNILMTVTCFEKSEQVQGAQKQFKNFQIEVQKGRYSLHGSDRSFPSLGDLMSHLKKQILRTDNISFMLKRCCQPKPREISNLLVATKKAQEWQPVYPMSQLSFDRILKKDLVQGEHLGRGTRTHIYSGTLMDYKDDEGTSEEKKIKVILKVLDPSHRDISLAFFEAASMMRQVSHKHIVYLYGVCVRDVENIMVEEFVEGGPLDLFMHRKSDVLTTPWKFKVAKQLASALIYLEDKDLVHGNVCTKNLLLAREGIDSECGPFIKLSDPGIPITVLSRQECIERIPWIAPECVEDSKNLSVAADKWSFGTTLWEICYNGEIPLKDKTLIEKERFYESRCRPVTPSCKELADLMTRCMNYDPNQRPFFRAIMRDINKLEEQNPDIVSEKKPATEVDPTHFEKRFLKRIRDLGEGHFGKVELCRYDPEGDNTGEQVAVKSLKPESGGNHIADLKKEIEILRNLYHENIVKYKGICTEDGGNGIKLIMEFLPSGSLKEYLPKNKNKINLKQQLKYAVQICKGMDYLGSRQYVHRDLAARNVLVESEHQVKIGDFGLTKAIETDKEYYTVKDDRDSPVFWYAPECLMQSKFYIASDVWSFGVTLHELLTYCDSDSSPMALFLKMIGPTHGQMTVTRLVNTLKEGKRLPCPPNCPDEVYQLMRKCWEFQPSNRTSFQNLIEGFEALLK

SEQ ID NO: 1807 - protein, 1154 aa, Homo sapiens [sequence omitted]

SEQ ID NO: 1808 - protein, 1154 aa, Homo sapiens
MPGGGPEMDDYMETLKDEEDALWENVECNRHMLSRYINPAKLTPYLRQCKVIDEQDEDEVLNAPMLPSKINRAGRLLDILHTKGQRGYVVFLESLEFYYPELYKLVTGKEPTRRFSTIVVEEGHEGLTHFLMNEVIKLQQQMKAKDLQRCELLARLRQLEDEKKQMTLTRVELLTFQERYYKMKEERDSYNDELVKVKDDNYNLAMRYAQLSEEKNMAVMRSRDLQLEIDQLKHRLNKMEEECKLERNQSLKLKNDIENRPKKEQVLELERENEMLKTKNQELQSIIQAGKRSLPDSDKAILDILEHDRKEALEDRQELVNRIYNLQEEARQAEELRDKYLEEKEDLELKCSTLGKDCEMYKHRMNTVMLQLEEVERERDQAFHSRDEAQTQYSQCLIEKDKYRKQIRELEEKNDEMRIEMVRREACIVNLESKLRRLSKDSNNLDQSLPRNLPVTIISQDFGDASPRTNGQEADDSSTSEESPEDSKYFLPYHPPQRRMNLKGIQLQRAKSPISLKRTSDFQAKGHEEEGTDASPSSCGSLPITNSFTKMQPPRSRSSIMSITAEPPGNDSIVRRYKEDAPHRSTVEEDNDSGGFDALDLDDDSHERYSFGPSFIHSSSSSHQSEGLDAYDLEQVNLMFRKFSLERPFRPSVTSVGHVRGPGPSVQHTTLNGDSLTSQLTLLGGNARGSFVHSVKPGSLAEKAGLREGHQLLLLEGCIRGERQSVPLDTCTKEEAHWTIQRCSGPVTLHYKVNHEGYRKLVKDMEDGLITSGDSFYIRLNLNISSQLDACTMSLKCDDVVHVRDTMYQDRHEWLCARVDPFTDHDLDMGTIPSYSRAQQLLLVKLQRLMHRGSREEVDGTHHTLRALRNTLQPEEALSTSDPRVSPRLSRASFLFGQLLQFVSRSENKYKRMNSNERVRIISGSPLGSLARSSLDATKLLTEKQEELDPESELGKNLSLIPYSLVRAFYCERRRPVLFTPTVLAKTLVQRLLNSGGAMEFTICKSDIVTRDEFLRRQKTETIIYSREKNPNAFECIAPANIEAVAAKNKHCLLEAGIGCTRDLIKSNIYPIVLFIRVCEKNIKRFRKLLPRPETEEEFLRVCRLKEKELEALPCLYATVEPDMWGSVEELLRVVKDKIGEEQRKTIWVDEDQL

SEQ ID NO: 1809 - protein, 1154 aa, Homo sapiens
MPGGGPEMDDYMETLKDEEDALWENVECNRHMLSRYINPAKLTPYLRQCKVIDEQDEDEVLNAPMLPSKINRAGRLLDILHTKGQRGYVVFLESLEFYYPELYKLVTGKEPTRRFSTIVVEEGHEGLTHFLMNEVIKLQQQMKAKDLQRCELLARLRQLEDEKKQMTLTRVELLTFQERYYKMKEERDSYNDELVKVKDDNYNLAMRYAQLSEEKNMAVMRSRDLQLEIDQLKHRLNKMEEECKLERNQSLKLKNDIENRPKKEQVLELERENEMLKTKNQELQSIIQAGKRSLPDSDKAILDILEHDRKEALEDRQELVNRIYNLQEEARQAEELRDKYLEEKEDLELKCSTLGKDCEMYKHRMNTVMLQLEEVERERDQAFHSRDEAQTQYSQCLIEKDKYRKQIRELEEKNDEMRIEMVRREACIVNLESKLRRLSKDSNNLDQSLPRNLPVTIISQDFGDASPRTNGQEADDSSTSEESPEDSKYFLPYHPPQRRMNLKGIQLQRAKSPISLKRTSDFQAKGHEEEGTDASPSSCGSLPITNSFTKMQPPRSRSSIMSITAEPPGNDSIVRRYKEDAPHRSTVEEDNDSGGFDALDLDDDSHERYSFGPSSIHSSSSSHQSKGLDAYDLEQVNLMFRKFSLERPFRPSVTSVGHVRGPGPSVQHTTLNGDSLTSQLTLLGGNARGSFVHSVKPGSLAEKAGLREGHQLLLLEGCIRGERQSVPLDTCTKEEAHWTIQRCSGPVTLHYKVNHEGYRKLVKDMEDGLITSGDSFYIRLNLNISSQLDACTMSLKCDDVVHVRDTMYQDRHEWLCARVDPFTDHDLDMGTIPSYSRAQQLLLVKLQRLMHRGSREEVDGTHHTLRALRNTLQPEEALSTSDPRVSPRLSRASFLFGQLLQFVSRSENKYKRMNSNERVRIISGSPLGSLARSSLDATKLLTEKQEELDPESELGKNLSLIPYSLVRAFYCERRRPVLFTPTVLAKTLVQRLLNSGGAMEFTICKSDIVTRDEFLRRQKTETIIYSREKNPNAFECIAPANIEAVAAKNKHCLLEAGIGCTRDLIKSNIYPIVLFIRVCEKNIKRFRKLLPRPETEEEFLRVCRLKEKELEALPCLYATVEPDMWGSVEELLRVVKDKIGEEQRKTIWVDEDQL

SEQ ID NO: 1810 - protein, 769 aa, Homo sapiens
MAQWNQLQQLDTRYLEQLHQLYSDSFPMELRQFLAPWIESQDWAYAASKESHATLVFHNLLGEIDQQYSRFLQESNVLYQHNLRRIKQFLQSRYLEKPMEIARIVARCLWEESRLLQTAATAAQQGGQANHPTAAVVTEKQQMLEQHLQDVRKRVQDLEQKMKVVENLQDDFDFNYKTLKSQGDMQDLNGNNQSVTRQKMQQLEQMLTALDQMRRSIVSELAGLLSAMEYVQKTLTDEELADWKRRQQIACIGGPPNICLDRLENWITSLAESQLQTRQQIKKLEELQQKVSYKGDPIVQHRPMLEERIVELFRNLMKSAFVVERQPCMPMHPDRPLVIKTGVQFTTKVRLLVKFPELNYQLKIKVCIDKDSGDVAALRGSRKFNILGTNTKVMNMEESNNGSLSAEFKHLTLREQRCGNGGRANCDASLIVTEELHLITFETEVYHQGLKIDLETHSLPVVVISNICQMPNAWASILWYNMLTNNPKNVNFFTKPPIGTWDQVAEVLSWQFSSTTKRGLSIEQLTTLAEKLLGPGVNYSGCQITWAKFCKENMAGKGFSFWVWLDNIIDLVKKYILALWNEGYIMGFISKERERAILSTKPPGTFLLRFSESSKEGGVTFTWVEKDISGKTQIQSVEPYTKQQLNNMSFAEIIMGYKIMDATNILVSPLVYLYPDIPKEEAFGKYCRPESQEHPEADPGAAPYLKTKFICVTPTTCSNTIDLPMSPRTLDSLMQFGNNGEGAEPSAGGQFESLTFDMELTSECATSPM

SEQ ID NO: 1811 - protein, 769 aa, Homo sapiens
MAQWNQLQQLDTRYLEQLHQLYSDSFPMELRQFLAPWIESQDWAYAASKESHATLVFHNLLGEIDQQYSRFLQESNVLYQHNLRRIKQFLQSRYLEKPMEIARIVARCLWEESRLLQTAATAAQQGGQANHPTAAVVTEKQQMLEQHLQDVRKRVQDLEQKMKVVENLQDDFDFNYKTLKSQGDMQDLNGNNQSVTRQKMQQLEQMLTALDQMRRSIVSELAGLLSAMEYVQKTLTDEELADWKRRQQIACIGGPPNICLDRLENWITSLAESQLQTRQQIKKLEELQQKVSYKGDPIVQHRPMLEERIVELFRNLMKSAFVVERQPCMPMHPDRPLVIKTGVQFTTKVRLLVKFPELNYQLKIKVCIDKDSGDVAALRGSRKFNILGTNTKVMNMEESNNGSLSAEFKHLTLREQRCGNGGRANCDASLIVTEELHLITFETEVYHQGLKIDLETHSLPVVVISNICQMPNAWASILWYNMLTNNPKNVNFFTKPPIGTWDQVAEVLSWQFSSTTKRGLSIEQLTTLAEKLLGPGVNYSGCQITWAKFCKENMAGKGFSFWVWLDNIIDLVKKYILALWNEGYIMGFISKERERAILSTKPPGTFLLRFSESSKEGGVTFTWVEKDISGKTQIQSVEPYTKQQLNNMSFAEIIMGYKIMYATNILVSPLVYLYPDIPKEEAFGKYCRPESQEHPEADPGAAPYLKTKFICVTPTTCSNTIDLPMSPRTLDSLMQFGNNGEGAEPSAGGQFESLTFDMELTSECATSPM

SEQ ID NO: 1812 - protein, 769 aa, Homo sapiens
MAQWNQLQQLDTRYLEQLHQLYSDSFPMELRQFLAPWIESQDWAYAASKESHATLVFHNLLGEIDQQYSRFLQESNVLYQHNLRRIKQFLQSRYLEKPMEIARIVARCLWEESRLLQTAATAAQQGGQANHPTAAVVTEKQQMLEQHLQDVRKRVQDLEQKMKVVENLQDDFDFNYKTLKSQGDMQDLNGNNQSVTRQKMQQLEQMLTALDQMRRSIVSELAGLLSAMEYVQKTLTDEELADWKRRQQIACIGGPPNICLDRLENWITSLAESQLQTRQQIKKLEELQQKVSYKGDPIVQHRPMLEERIVELFRNLMKSAFVVERQPCMPMHPDRPLVIKTGVQFTTKVRLLVKFPELNYQLKIKVCIDKDSGDVAALRGSRKFNILGTNTKVMNMEESNNGSLSAEFKHLTLREQRCGNGGRANCDASLIVTEELHLITFETEVYHQGLKIDLETHSLPVVVISNICQMPNAWASILWYNMLTNNPKNVNFFTKPPIGTWDQVAEVLSWQFSSTTKRGLSIEQLTTLAEKLLGPGVNYSGCQITWAKFCKENMAGKGFSFWVWLDNIIDLVKKYILALWNEGYIMGFISKERERAILSTKPPGTFLLRFSESSKEGGVTFTWVEKDISGKTQIQSVEPFTKQQLNNMSFAEIIMGYKIMDATNILVSPLVYLYPDIPKEEAFGKYCRPESQEHPEADPGAAPYLKTKFICVTPTTCSNTIDLPMSPRTLDSLMQFGNNGEGAEPSAGGQFESLTFDMELTSECATSPM

SEQ ID NO: 1813 - protein, 769 aa, Homo sapiens
MAQWNQLQQLDTRYLEQLHQLYSDSFPMELRQFLAPWIESQDWAYAASKESHATLVFHNLLGEIDQQYSRFLQESNVLYQHNLRRIKQFLQSRYLEKPMEIARIVARCLWEESRLLQTAATAAQQGGQANHPTAAVVTEKQQMLEQHLQDVRKRVQDLEQKMKVVENLQDDFDFNYKTLKSQGDMQDLNGNNQSVTRQKMQQLEQMLTALDQMRRSIVSELAGLLSAMEYVQKTLTDEELADWKRRQQIACIGGPPNICLDRLENWITSLAESQLQTRQQIKKLEELQQKVSYKGDPIVQHRPMLEERIVELFRNLMKSAFVVERQPCMPMHPDRPLVIKTGVQFTTKVRLLVKFPELNYQLKIKVCIDKDSGDVAALRGSRKFNILGTNTKVMNMEESNNGSLSAEFKHLTLREQRCGNGGRANCDASLIVTEELHLITFETEVYHQGLKIDLETHSLPVVVISNICQMPNAWASILWYNMLTNNPKNVNFFTKPPIGTWDQVAEVLSWQFSSTTKRGLSIEQLTTLAEKLLGPGVNYSGCQITWAKFCKENMAGKGFSFWVWLDNIIDLVKKYILALWNEGYIMGFISKERERAILSTKPPGTFLLRFSESSKEGGVTFTWVEKDISGKTQIQSVEPYTKQQLNNMSFAEIIMGYKIMDATNILVSPLVYLYPDIPKEEAFGKYCRPESQEHPEADPGATPYLKTKFICVTPTTCSNTIDLPMSPRTLDSLMQFGNNGEGAEPSAGGQFESLTFDMELTSECATSPM

SEQ ID NO: 1814 - protein, 769 aa, Homo sapiens
MAQWNQLQQLDTRYLEQLHQLYSDSFPMELRQFLAPWIESQDWAYAASKESHATLVFHNLLGEIDQQYSRFLQESNVLYQHNLRRIKQFLQSRYLEKPMEIARIVARCLWEESRLLQTAATAAQQGGQANHPTAAVVTEKQQMLEQHLQDVRKRVQDLEQKMKVVENLQDDFDFNYKTLKSQGDMQDLNGNNQSVTRQKMQQLEQMLTALDQMRRSIVSELAGLLSAMEYVQKTLTDEELADWKRRQQIACIGGPPNICLDRLENWITSLAESQLQTRQQIKKLEELQQKVSYKGDPIVQHRPMLEERIVELFRNLMKSAFVVERQPCMPMHPDRPLVIKTGVQFTTKVRLLVKFPELNYQLKIKVCIDKDSGDVAALRGSRKFNILGTNTKVMNMEESNNGSLSAEFKHLTLREQRCGNGGRANCDASLIVTEELHLITFETEVYHQGLKIDLETHSLPVVVISNICQMPNAWASILWYNMLTNNPKNVNFFTKPPIGTWDQVAEVLSWQFSSTTKRGLSIEQLTTLAEKLLGPGVNYSGCQITWAKFCKENMAGKGFSFWVWLDNIIDLVKKYILALWNEGYIMGFISKERERAILSTKPPGTFLLRFSESRKEGGVTFTWVEKDISGKTQIQSVEPYTKQQLNNMSFAEIIMGYKIMDATNILVSPLVYLYPDIPKEEAFGKYCRPESQEHPEADPGAAPYLKTKFICVTPTTCSNTIDLPMSPRTLDSLMQFGNNGEGAEPSAGGQFESLTFDMELTSECATSPM

SEQ ID NO: 1815 - protein, 769 aa, Homo sapiens
MAQWNQLQQLDTRYLEQLHQLYSDSFPMELRQFLAPWIESQDWAYAASKESHATLVFHNLLGEIDQQYSRFLQESNVLYQHNLRRIKQFLQSRYLEKPMEIARIVARCLWEESRLLQTAATAAQQGGQANHPTAAVVTEKQQMLEQHLQDVRKRVQDLEQKMKVVENLQDDFDFNYKTLKSQGDMQDLNGNNQSVTRQKMQQLEQMLTALDQMRRSIVSELAGLLSAMEYVQKTLTDEELADWKRRQQIACIGGPPNICLDRLENWITSLAESQLQTRQQIKKLEELQQKVSYKGDPIVQHRPMLEERIVELFRNLMKSAFVVERQPCMPMHPDRPLVIKTGVQFTTKVRLLVKFPELNYQLKIKVCIDKDSGDVAALRGSRKFNILGTNTKVMNMEESNNGSLSAEFKHLTLREQRCGNGGRANCDASLIVTEELHLITFETEVYHQGLKIDLETHSLPVVVISNICQMPNAWASILWYNMLTNNPKNVNFFTKPPIGTWDQVAEVLSWQFSSTTKRGLSIEQLTTLAEKLLGPGVNYSGCQITWAKFCKENMAGKGFSFWVWLDNIIDLVKKYILALWNEGYIMGFISKERERAILSTKPPGTFLLRFSESSKEGRVTFTWVEKDISGKTQIQSVEPYTKQQLNNMSFAEIIMGYKIMDATNILVSPLVYLYPDIPKEEAFGKYCRPESQEHPEADPGAAPYLKTKFICVTPTTCSNTIDLPMSPRTLDSLMQFGNNGEGAEPSAGGQFESLTFDMELTSECATSPM

SEQ ID NO: 1816 - protein, 369 aa, Homo sapiens
MLKPSLPFTSLLFLQLPLLGVGLNTTILTPNGNEDTTADFFLTTMPTDSLSVSTLPLPEVQCFVFNVEYMNCTWNSSSEPQPTNLTLHYWYKNSDNDKVQKCSHYLFSEEITSGCQLQKKEIHLYQTFVVQLQDPREPRRQATQMLKLQNLVIPWAPENLTLHKLSESQLELNWNNRFLNHCLEHLVQYRTDWDHSWTEQSVDYRHKFSLPSVDGQKRYTFRVRSRFNPLCGSAQHWSEWSHPIHWGSNTSKENPFLFALEAVVISVGSMGLIISLLCVYFWLERTMPRIPTLKNLEDLVTEYHGNFSAWSGVSKGLAESLQPDYSERLCLVSEIPPKGGALGEGPGASPCNQHSPYWAPPCYTLKPET

SEQ ID NO: 1817 - protein, 369 aa, Homo sapiens
MLKPSLPFTSLLFLQLPLLGVGLNTTILTPNGNEDTTADFFLTTMPTDSLSVSTLPLPEVQCFVFNVEYMNCTWNSSSEPQPTNLTLHYWYKNSDNDKVQKCSHYLFSEEITSGCQLQKKEIHLYQTFVVQLQDPREPRRQATQMLKLQNLVIPWAPENLTLHKLSESQLELNWNNRFLNHCLEHLVQYRTDWDHSWTEQSVDYRHKFSLPSVDGQKRYTFRVRSRFNPLCGSAQHWSEWSHPIHWGSNTSKENPFLFALEAVVISVGSMGLIISLLCVYFWLERTMPRIPTLKNLEDLVTEYHGNFSAWSGVSEGLAESLQPDYSERLCLVSEIPPKGGALGEGPGASPCNQHSPYWAPPCYTLKPET

SEQ ID NO: 1818 - protein, 766 aa, Homo sapiens [sequence omitted]

SEQ ID NO: 1819 - protein, 766 aa, Homo sapiens
MAALSGGGGGGAEPGQALFNGDMEPEAGAGAGAAASSAADPAIPEEVWNIKQMIKLTQEHIEALLDKFGGEHNPPSIYLEAYEEYTSKLDALQQREQQLLESLGNGTDFSVSSSASMDTVTSSSSSSLSVLPSSLSVFQNPTDVARSNPKSPQKPIVRVFLPNKQRTVVPARCGVTVRDSLKKALMMRGLIPECCAVYRIQDGEKKPIGWDTDISWLTGEELHVEVLENVPLTTHNFVRKTFFTLAFCDFCRKLLFQGFRCQTCGYKFHQRCSTEVPLMCVNYDQLDLLFVSKFFEHHPIPQEEASLAETALTSGSSPSAPASDSIGPQILTSPSPSKSIPIPQPFRPADEDHRNQFGQRDRSSSAPNVHINTIEPVNIDDLIRDQGFRGDGGSTTGLSATPPASLPGSLTNVKALQKSPGPQRERKSSSSSEDRNRMKTLGRRDSSDDWEIPDGQITVGQRIGSGSFGTVYKGKWHGDVAVKMLNVTAPTPQQLQAFKNEVGVLRKTRHVNILLFMGYSTKPQLAIVTQWCEGSSLYHHLHIIETKFEMIKLIDIARQTAQGMDYLHAKSIIHRDLKSNNIFLHEDLTVKIGDFGLATEKSRWSGSHQFEQLSGSILWMAPEVIRMQDKNPYSFQSDVYAFGIVLYELMTGQLPYSNINNRDQIIFMVGRGYLSPDLSKVRSNCPKAMKRLMAECLKKKRDERPLFPQILASIELLARSLPKIHRSASEPSLNRAGFQTEDFSLYACASPKTPIQAGGYGAFPVH

SEQ ID NO: 1820 - protein, 597 aa, Homo sapiens
MGKKHKKHKAEWRSSYEDYADKPLEKPLKLVLKVGGSEVTELSGSGHDSSYYDDRSDHERERHKEKKKKKKKKSEKEKHLDDEERRKRKEEKKRKREREHCDTEGEADDFDPGKKVEVEPPPDRPVRACRTQPAENESTPIQQLLEHFLRQLQRKDPHGFFAFPVTDAIAPGYSMIIKHPMDFGTMKDKIVANEYKSVTEFKADFKLMCDNAMTYARPDTVYYKLAKKILHAGFKMMSKQAALLGNEDTAVEEPVPEVVPVQVETAKKSKKPSREVISCMFEPEGNACSLTDSTAEEHVLALVEHAADEARDRINRFLPGGKMGYLKRNGDGSLLYSVVNTAEPDADEEETHPVDLSSLSSKLLPGFTTLGFKDERRNKVTFLSSATTALSMQNNSVFGDLKSDEMELLYSAYGDETGVQCALSLQEFVKDAGSYSKKVVDDLLDQITGGDHSRTLFQLKQRRNVPMKPPDEAKVGDTLGDSSSSVLEFMSMKSYPDVSVDISMLSSLGKVKKELDPDDSHLNLDETTKLLQDLHEAQAERGGSRPSSNLSSLSNASERDQHHLGSPSRLSVGEQPDVTHDPYEFLQSPEPAASAKT

SEQ ID NO: 1821 - protein, 597 aa, Homo sapiens
MGKKHKKHKAEWRSSYEDYADKPLEKPLKLVLKVGGSEVTELSGSGHDSSYYDDRSDHERERHKEKKKKKKKKSEKEKHLDDEERRKRKEEKKRKREREHCDTEGEADDFDPGKKVEVEPPPDRPVRACRTQPAENESTPIQQLLEHFLRQLQRKDPHGFFAFPVTDAIAPGYSMIIKHPMDFGTMKDKIVANEYKSVTEFKADFKLMCDNAMTYNRPDTVYYKLAKKILHAGFKMMSKQAALLGNEDTAVEEPVPEVVPVQVETAKKSKKPSREVISCMFEPEGNACSLTDSTAEEHVLALVEHAADEARDRINRFLPGGKMGYLKRNGDGSLLYSVVNTAEPDADEEETHPVDLSSLSSKLLPGFTTLGFKDERRNKVTFLSSATTALSMQNNSVFGDLKSDEMELLYSAYGDETGVQCALSLQEFVKDAGSYSKKVVDDLLDQITGGDHSRTLFQLKQRRNVPMKPPDEAKVGDTLGDSSSSVLEFMSMKSYPDVSVDISMLSSLGKVKKELDPDDSHLNLDETTKLLQDLHEAQAERGGSRPSSNLSSLSNASERDQHHLGSPSRLSVGEQPDVTHDPYEFLQSPEPAASAKT

SEQ ID NO: 1822 - protein, 544 aa, Homo sapiens
MMTGQTMSERGTKKRKRRRRRSPRRRSIWTMRKEGSERKRRSGSERGSTVTRRERLTTLILGRRWRWSRPQIGQSERAGHSQPKMRAHLFSNSWNTSSASFRDPHGFFAFPVTDAIAPGYSMIIKHPMDFGTMKDKIVANEYKSVTEFKADFKLMCDNAMTYNRPDTVYYKLAKKILHAGFKMMSKQAALLGNEDTAVEEPVPEVVPVQVETAKKSKKPSREVISCMFEPEGNACSLTDSTAEEHVLALVEHAADEARDRINRFLPGGKMGYLKRNGDGSLLYSVVNTAEPDADEEETHPVDLSSLSSKLLPGFTTLGFKDERRNKVTFLSSATTALSMQNNSVFGDLKSDEMELLYSAYGDETGVQCALSLQEFVKDAGSYSKKVVDDLLDQITGGDHSRTLFQLKQRRNVPMKPPDEAKVGDTLGDSSSSVLEFMSMKSYPDVSVDISMLSSLGKVKKELDPDDSHLNLDETTKLLQDLHEAQAERGGSRPSSNLSSLSNASERDQHHLGSPSRLSVGEQPDVTHDPYEFLQSPEPAASAKT

SEQ ID NO: 1823 - protein, 544 aa, Homo sapiens
MMTGQTMSERGTKKRKRRRRRSPRRRSIWTMRKEGSERKRRSGSERGSTVTRRERLTTLILGRRWRWSRPQIGQSERAGHSQPKMRAHLFSNSWNTSSASFRDPHGFFAFPVTDAIAPGYSMIIKHPMDFGTMKDKIVANEYKSVTEFKADFKLMCDNAMTYNRPDTVYYKLAKKILHAGFKMMSKQAALLGNEDTAVEEPVPEVVPVQVETAKKSKKPSREVISCMFEPEGNACSLTDSTAEEHVLALVEHAADEARDRINRFLPGGKMGYLKRNGDGSLLYSVVNTAEPDADEEETHPVDLSSLSSKLLPGFTTLGFKDERRNKVTFLSSATTALSMQNNSVFGDLKSDEMELLYSAYGDETGVQCALSLQEFVKDAGSYSKKVVDDLLDQITGGDHSRTLFQLKQRRNVPMKPPDEAKVGDTLGDSSSSVLEFMSMKSYPDVSVDISMLSSLGKVKKELDPDDSHLNLDETTKLLHDLHEAQAERGGSRPSSNLSSLSNASERDQHHLGSPSRLSVGEQPDVTHDPYEFLQSPEPAASAKT

SEQ ID NO: 1824 - protein, 751 aa, Homo sapiens
MGQTGKKSEKGPVCWRKRVKSEYMRLRQLKRFRRADEVKSMFSSNRQKILERTEILNQEWKQRRIQPVHILTSVSSLRGTRECSVTSDLDFPTQVIPLKTLNAVASVPIMYSWSPLQQNFMVEDETVLHNIPYMGDEVLDQDGTFIEELIKNYDGKVHGDRECGFINDEIFVELVNALGQYNDDDDDDDGDDPEEREEKQKDLEDHRDDKESRPPRKFPSDKIFEAISSMFPDKGTAEELKEKYKELTEQQLPGALPPECTPNIDGPNAKSVQREQSLHSFHTLFCRRCFKYDCFLHRKCNYSFHATPNTYKRKNTETALDNKPCGPQCYQHLEGAKEFAAALTAERIKTPPKRPGGRRRGRLPNNSSRPSTPTINVLESKDTDSDREAGTETGGENNDKEEEEKKDETSSSSEANSRCQTPIKMKPNIEPPENVEWSGAEASMFRVLIGTYYDNFCAIARLIGTKTCRQVYEFRVKESSIIAPAPAEDVDTPPRKKKRKHRLWAAHCRKIQLKKDGSSNHVYNYQPCDHPRQPCDSSCPCVIAQNFCEKFCQCSSECQNRFPGCRCKAQCNTKQCPCYLAVRECDPDLCLTCGAADHWDSKNVSCKNCSIQRGSKKHLLLAPSDVAGWGIFIKDPVQKNEFISEYCGEIISQDEADRRGKVYDKYMCSFLFNLNNDFVVDATRKGNKIRFANHSVNPNCYAKVMMVNGDHRIGIFAKRAIQTGEELFFDYRYSQADALKYVGIEREMEIP

SEQ ID NO: 1825 - protein, 1052 aa, Homo sapiens
MENLESRLKNAPYFRCEKGTDSIPLCRKCETCVLAWKIFSTKEWFCRINDISQRRFLVGILKQLNSLYLLHYFQNILQTTQGKDFIYNRSRINLSKKEGKVVKSSLNQMLDKTVEQKMKEILYWFANSTQWTKANYTLLLLQMCNPKLLLTAANVIRVLFLREENNISGLNQDITDVCFSPEKDHSSKSATSQVYWTAKTQHTSLPLSKAPENEHLLGAASNPEEPWRNSLRCISEMNRLFSGKGDITKPGYDPCNLLVDLDDIRDLSSGFSKYRDFIRYLPIHLSKYILRMLDRHTLNKCASVSQHWAAMAQQVKMDLSAHGFIQNQITFLQGSYTRGIDPNYANKVSIPVPKMVDDGKSMRVKHPKWKLRTKNEYNLWTAYQNEETQQVLIEERNVFCGTYNVRILSDTWDQNRVIHYSGGDLIAVSSNRKIHLLDIIQVKAIPVEFRGHAGSVRALFLCEEENFLLSGSYDLSIRYWDLKSGVCTRIFGGHQGTITCMDLCKNRLVSGGRDCQVKVWDVDTGKCLKTFRHKDPILATRINDTYIVSSCERGLVKVWHIAMAQLVKTLSGHEGAVKCLFFDQWHLLSGSTDGLVMAWSMVGKYERCLMAFKHPKEVLDVSLLFLRVISACADGKIRIYNFLNGNCMKVLKANGRGDPVLSFFIQGNRMVVNTESNVLMFQFEHIKWQYAVEKTKQKKNKEKEEEKEENSLMEILSKCNIQVHSPRESVSSKQTVIQELLPGKPPKSRVLLKPAKFSSAVLIEELQSQGKSKSPRRDADDVEKAQKQGQLETPGKLPSHPKKKSWKIPMSPDQFLLTVSALQHAHNSGEFAYPCRPQTEITDVWGPSISYPRKVLNFKGKSIQRAVDRLRLSNPPIDVKRTSIPLEIQKLQPNLKISLHSPRVQSTIPQPMIIRSRFSGSLKGGDQVTSSIERAVCSTGPLTSMQVIKPNRMLAPQVGTATLSLKKERPRIYTALDPFRVNTEFVLLTVKEEKEHQEAKMKEYQARESTGVVDPGKVSKAAWIRKIKGLPIDNFTKQGKTAAPELGQNVFI

SEQ ID NO: 1826 - protein, 1052 aa, Homo sapiens
MENLESRLKNAPYFRCEKGTDSIPLCRKCETCVLAWKIFSTKEWFCRINDISQRRFLVGILKQLNSLYLLHYFQNILQTTQGKDFIYNRSRINLSKKEGKVVKSSLNQMLDKTVEQKMKEILYWFANSTQWTKANYTLLLLQMCNPKLLLTAANVIRVLFLREENNISGLNQDITDVCFSPEKDHSSKSATSQVYWTAKTQHTSLPLSKAPENEHLLGAASNPEEPWRNSLRCISEMNRLFSGKGDITKPGYDPCNLLVDLDDIRDLSSGFSKYRDFIRYLPIHLSKYILRMLDRHTLNKCASVSQHWAAMAQQVKMNLSAHGFIQNQITFLQGSYTRGIDPNYANKVSIPVPKMVDDGKSMRVKHPKWKLRTKNEYNLWTAYQNEETQQVLIEERNVFCGTYNVRILSDTWDQNRVIHYSGGDLIAVSSNRKIHLLDIIQVKAIPVEFRGHAGSVRALFLCEEENFLLSGSYDLSIRYWDLKSGVCTRIFGGHQGTITCMDLCKNRLVSGGRDCQVKVWDVDTGKCLKTFRHKDPILATRINDTYIVSSCERGLVKVWHIAMAQLVKTLSGHEGAVKCLFFDQWHLLSGSTDGLVMAWSMVGKYERCLMAFKHPKEVLDVSLLFLRVISACADGKIRIYNFLNGNCMKVLKANGRGDPVLSFFIQGNRMVVNTESNVLMFQFEHIKWQYAVEKTKQKKNKEKEEEKEENSLMEILSKCNIQVHSPRESVSSKQTVIQELLPGKPPKSRVLLKPAKFSSAVLIEELQSQGKSKSPRRDADDVEKAQKQGQLETPGKLPSHPKKKSWKIPMSPDQFLLTVSALQHAHNSGEFAYPCRPQTEITDVWGPSISYPRKVLNFKGKSIQRAVDRLRLSNPPIDVKRTSIPLEIQKLQPNLKISLHSPRVQSTIPQPMIIRSRFSGSLKGGDQVTSSIERAVCSTGPLTSMQVIKPNRMLAPQVGTATLSLKKERPRIYTALDPFRVNTEFVLLTVKEEKEHQEAKMKEYQARESTGVVDPGKVSKAAWIRKIKGLPIDNFTKQGKTAAPELGQNVFI

SEQ ID NO: 1827 - protein, 543 aa, Homo sapiens
MSRESDVEAQQSHGSSACSQPHGSVTQSQGSSSQSQGISSSSTSTMPNSSQSSHSSSGTLSSLETVSTQELYSIPEDQEPEDQEPEEPTPAPWARLWALQDGFANLECVNDNYWFGRDKSCEYCFDEPLLKRTDKYRTYSKKHFRIFREVGPKNSYIAYIEDHSGNGTFVNTELVGKGKRRPLNNNSEIALSLSRNKVFVFFDLTVDDQSVYPKALRDEYIMSKTLGSGACGEVKLAFERKTCKKVAIKIISKRKFAIGSAREADPALNVETEIEILKKLNHPCIIKIKNFFDAEDYYIVLELMEGGELFDKVVGNKRLKEATCKLYFYQMLLAVQYLHENGIIHRDLKPENVLLSSQEEDCLIKITDFGHSKILGETSLMRTLCGTPTYLAPEVLVSVGTAGYNRAVDCWSLGVILFICLSGYPPFSEHRTQVSLKDQITSGKYNFIPEVWAEVSEKALDLVKKLLVVDPKARFTTEEALRHPWLQDEDMKRKFQDLLSEENESTALPQVLAQPSTSRKRPREGEAEGAETTKRPAVCAAVL

SEQ ID NO: 1828 - protein, 1755 aa, Homo sapiens
MLSATPLYGNVHSWMNSERVRMCGASEDRKILVNDGDASKARLELREENPLNHNVVDASTAHRIDGLAALSMDRTGLIREGLRVPGNIVYSSLCGLGSEKGREAATSTLGGLGFSSERNPEMQFKPNTPETVEASAVSGKPPNGFSAIYKTPPGIQKSAVATAEALGLDRPASDKQSPLNINGASYLRLPWVNPYMEGATPAIYPFLDSPNKYSLNMYKALLPQQSYSLAQPLYSPVCTNGERFLYLPPPHYVGPHIPSSLASPMRLSTPSASPAIPPLVHCADKSLPWKMGVSPGNPVDSHAYPHIQNSKQPRVPSAKAVTSGLPGDTALLLPPSPRPSPRVHLPTQPAADTYSEFHKHYARISTSPSVALSKPYMTVSSEFPAARLSNGKYPKAPEGGEGAQPVPGHARKTAVQDRKDGSSPPLLEKQTVTKDVTDKPLDLSSKVVDVDASKADHMKKMAPTVLVHSRAGSGLVLSGSEIPKETLSPPGNGCAIYRSEIISTAPSSWVVPGPSPNEENNGKSMSLKNKALDWAIPQQRSSSCPRMGGTDAVITNVSGSVSSAGRPASASPAPNANADGTKTSRSSVETTPSVIQHVGQPPATPAKHSSSTSSKGAKASNPEPSFKANENGLPPSSIFLSPNEAFRSPPIPYPRSYLPYPAPEGIAVSPLSLHGKGPVYPHPVLLPNGSLFPGHLAPKPGLPYGLPTGRPEFVTYQDALGLGMVHPMLIPHTPIEITKEEKPERRSRSHERARYEDPTLRNRFSEILETSSTKLHPDVPTDKNLKPNPNWNQGKTVVKSDKLVYVDLLREEPDAKTDTNVSKPSFAAESVGQSAEPPKPSVEPALQQHRDFIALREELGRISDFHETYTFKQPVFTVSKDSVLAGTNKENLGLPVSTPFLEPPLGSDGPAVTFGKTQEDPKPFCVGSAPPSVDVTPTYTKDGADEAESNDGKVLKPKPSKLAKRIANSAGYVGDRFKCVTTELYADSSQLSREQRALQMEGLQEDSILCLPAAYCERAMMRFSELEMKEREGGHPATKDSEMCKFSPADWERLKGNQDKKPKSVTLEEAIAEQNESERCEYSVGNKHRDPFEAPEDKDLPVEKYFVERQPVSEPPADQVASDMPHSPTLRVDRKRKVSGDSSHTETTAEEVPEDPLLKAKRRRVSKDDWPEREMTNSSSNHLEDPHYSELTNLKVCIELTGLHPKKQRHLLHLRERWEQQVSAADGKPGRQSRKEVTQATQPEAIPQGTNITEEKPGRKRAEAKGNRSWSEESLKPSDNEQGLPVFSGSPPMKSLSSTSAGGKKQAQPSCAPASRPPAKQQKIKENQKTDVLCADEEEDCQAASLLQKYTDNSEKPSGKRLCKTKHLIPQESRRGLPLTGEYYVENADGKVTVRRFRKRPEPSSDYDLSPAKQEPKPFDRLQQLLPASQSTQLPCSSSPQETTQSRPMPPEARRLIVNKNAGETLLQRAARLGYEEVVLYCLENKICDVNHRDNAGYCALHEACARGWLNIVRHLLEYGADVNCSAQDGTRPLHDAVENDHLEIVRLLLSYGADPTLATYSGRTIMKMTHSELMEKFLTDYLNDLQGRNDDDASGTWDFYGSSVCEPDDESGYDVLANPPGPEDQDDDDDAYSDVFEFEFSETPLLPCYNIQVSVAQGPRNWLLLSDVLKKLKMSSRIFRCNFPNVEIVTIAEAEFYRQVSASLLFSCSKDLEAFNPESKELLDLVEFTNEIQTLLGSSVEWLHPSDLASDNYW

SEQ ID NO: 1829 - protein, 1755 aa, Homo sapiens
MLSATPLYGNVHSWMNSERVRMCGASEDRKILVNDGDASKARLELREENPLNHNVVDASTAHRIDGLAALSMDRTGLIREGLRVPGNIVYSSLCGLGSEKGREAATSTLGGLGFSSERNPEMQFKPNTPETVEASAVSGKPPNGFSAIYKTPPGIQKSAVATAEALGLDRPASDKQSPLNINGASYLRLPWVNPYMEGATPAIYPFLDSPNKYSLNMYKALLPQQSYSLAQPLYSPVCTNGERFLYLPPPHYVGPHIPSSLASPMRLSTPSASPAIPPLVHCADKSLPWKMGVSPGNPVDSHAYPHIQNSKQPRVPSAKAVTSGLPGDTALLLPPSPRPSPRVHLPTQPAADTYSEFHKHYARISTSPSVALSKPYMTVSSEFPAARLSNGKYPKAPEGGEGAQPVPGHARKTAVQDRKDGSSPPLLEKQTVTKDVTDKPLDLSSKVVDVDASKADHMKKMAPTVLVHSRAGSGLVLSGSEIPKETLSPPGNGCAIYRSEIISTAPSSWVVPGPSPNEENNGKSMSLKNKALDWAIPQQRSSSCPRMGGTDAVITNVSGSVSSAGRPASASPAPNANADGTKTSRSSVETTPSVIQHVGQPPATPAKHSSSTSSKGAKASNPEPSFKANENGLPPSSIFLSPNEAFRSPPIPYPRSYLPYPAPEGIAVSPLSLHGKGPVYPHPVLLPNGSLFPGHLAPKPGLPYGLPTGRPEFVTYQDALGLGMVHPMLIPHTPIEITKEEKPERRSRSHERARYEDPTLRNRFSEILETSSTKLHPDVPTDKNLKPNPNWNQGKTVVKSDKLVYVDLLREEPDAKTDTNVSKPSFAAESVGQSAEPPKPSVEPALQQHRDFIALREELGRISDFHETYTFKQPVFTVSKDSVLAGTNKENLGLPLSTPFLEPPLGSDGPAVTFGKTQEDPKPFCVGSAPPSVDVTPTYTKDGADEAESNDGKVLKPKPSKLAKRIANSAGYVGDRFKCVTTELYADSSQLSREQRALQMEGLQEDSILCLPAAYCERAMMRFSELEMKEREGGHPATKDSEMCKFSPADWERLKGNQDKKPKSVTLEEAIAEQNESERCEYSVGNKHRDPFEAPEDKDLPVEKYFVERQPVSEPPADQVASDMPHSPTLRVDRKRKVSGDSSHTETTAEEVPEDPLLKAKRRRVSKDDWPEREMTNSSSNHLEDPHYSELTNLKVCIELTGLHPKKQRHLLHLRERWEQQVSAADGKPGRQSRKEVTQATQPEAIPQGTNITEEKPGRKRAEAKGNRSWSEESLKPSDNEQGLPVFSGSPPMKSLSSTSAGGKKQAQPSCAPASRPPAKQQKIKENQKTDVLCADEEEDCQAASLLQKYTDNSEKPSGKRLCKTKHLIPQESRRGLPLTGEYYVENADGKVTVRRFRKRPEPSSDYDLSPAKQEPKPFDRLQQLLPASQSTQLPCSSSPQETTQSRPMPPEARRLIVNKNAGETLLQRAARLGYEEVVLYCLENKICDVNHRDNAGYCALHEACARGWLNIVRHLLEYGADVNCSAQDGTRPLHDAVENDHLEIVRLLLSYGADPTLATYSGRTIMKMTHSELMEKFLTDYLNDLQGRNDDDASGTWDFYGSSVCEPDDESGYDVLANPPGPEDQDDDDDAYSDVFEFEFSETPLLPCYNIQVSVAQGPRNWLLLSDVLKKLKMSSRIFRCNFPNVEIVTIAEAEFYRQVSASLLFSCSKDLEAFNPESKELLDLVEFTNEIQTLLGSSVEWLHPSDLASDNYW

SEQ ID NO: 1830 - protein, 1755 aa, Homo sapiens
MLSATPLYGNVHSWMNSERVRMCGASEDRKILVNDGDASKARLELREENPLNHNVVDASTAHRIDGLAALSMDRTGLIREGLRVPGNIVYSSLCGLGSEKGREAATSTLGGLGFSSERNPEMQFKPNTPETVEASAVSGKPPNGFSAIYKTPPGIQKSAVATAEPLGLDRPASDKQSPLNINGASYLRLPWVNPYMEGATPAIYPFLDSPNKYSLNMYKALLPQQSYSLAQPLYSPVCTNGERFLYLPPPHYVGPHIPSSLASPMRLSTPSASPAIPPLVHCADKSLPWKMGVSPGNPVDSHAYPHIQNSKQPRVPSAKAVTSGLPGDTALLLPPSPRPSPRVHLPTQPAADTYSEFHKHYARISTSPSVALSKPYMTVSSEFPAARLSNGKYPKAPEGGEGAQPVPGHARKTAVQDRKDGSSPPLLEKQTVTKDVTDKPLDLSSKVVDVDASKADHMKKMAPTVLVHSRAGSGLVLSGSEIPKETLSPPGNGCAIYRSEIISTAPSSWVVPGPSPNEENNGKSMSLKNKALDWAIPQQRSSSCPRMGGTDAVITNVSGSVSSAGRPASASPAPNANADGTKTSRSSVETTPSVIQHVGQPPATPAKHSSSTSSKGAKASNPEPSFKANENGLPPSSIFLSPNEAFRSPPIPYPRSYLPYPAPEGIAVSPLSLHGKGPVYPHPVLLPNGSLFPGHLAPKPGLPYGLPTGRPEFVTYQDALGLGMVHPMLIPHTPIEITKEEKPERRSRSHERARYEDPTLRNRFSEILETSSTKLHPDVPTDKNLKPNPNWNQGKTVVKSDKLVYVDLLREEPDAKTDTNVSKPSFAAESVGQSAEPPKPSVEPALQQHRDFIALREELGRISDFHETYTFKQPVFTVSKDSVLAGTNKENLGLPVSTPFLEPPLGSDGPAVTFGKTQEDPKPFCVGSAPPSVDVTPTYTKDGADEAESNDGKVLKPKPSKLAKRIANSAGYVGDRFKCVTTELYADSSQLSREQRALQMEGLQEDSILCLPAAYCERAMMRFSELEMKEREGGHPATKDSEMCKFSPADWERLKGNQDKKPKSVTLEEAIAEQNESERCEYSVGNKHRDPFEAPEDKDLPVEKYFVERQPVSEPPADQVASDMPHSPTLRVDRKRKVSGDSSHTETTAEEVPEDPLLKAKRRRVSKDDWPEREMTNSSSNHLEDPHYSELTNLKVCIELTGLHPKKQRHLLHLRERWEQQVSAADGKPGRQSRKEVTQATQPEAIPQGTNITEEKPGRKRAEAKGNRSWSEESLKPSDNEQGLPVFSGSPPMKSLSSTSAGGKKQAQPSCAPASRPPAKQQKIKENQKTDVLCADEEEDCQAASLLQKYTDNSEKPSGKRLCKTKHLIPQESRRGLPLTGEYYVENADGKVTVRRFRKRPEPSSDYDLSPAKQEPKPFDRLQQLLPASQSTQLPCSSSPQETTQSRPMPPEARRLIVNKNAGETLLQRAARLGYEEVVLYCLENKICDVNHRDNAGYCALHEACARGWLNIVRHLLEYGADVNCSAQDGTRPLHDAVENDHLEIVRLLLSYGADPTLATYSGRTIMKMTHSELMEKFLTDYLNDLQGRNDDDASGTWDFYGSSVCEPDDESGYDVLANPPGPEDQDDDDDAYSDVFEFEFSETPLLPCYNIQVSVAQGPRNWLLLSDVLKKLKMSSRIFRCNFPNVEIVTIAEAEFYRQVSASLLFSCSKDLEAFNPESKELLDLVEFTNEIQTLLGSSVEWLHPSDLASDNYW

SEQ ID NO: 1831 - protein, 1541 aa, Homo sapiens
MKDKQKKKKERTWAEAARLVLENYSDAPMTPKQILQVIEAEGLKEMRSGTSPLACLNAMLHSNSRGGEGLFYKLPGRISLFTLKKDALQWSRHPATVEGEEPEDTADVESCGSNEASTVSGENDVSLDETSSNASCSTESQSRPLSNPRDSYRASSQANKQKKKTGVMLPRVVLTPLKVNGAHVESASGFSGCHADGESGSPSSSSSGSLALGSAAIRGQAEVTQDPAPLLRGFRKPATGQMKRNRGEEIDFETPGSILVNTNLRALINSRTFHALPSHFQQQLLFLLPEVDRQVGTDGLLRLSSSALNNEFFTHAAQSWRERLADGEFTHEMQVRIRQEMEKEKKVEQWKEKFFEDYYGQKLGLTKEESLQQNVGQEEAEIKSGLCVPGESVRIQRGPATRQRDGHFKKRSRPDLRTRARRNLYKKQESEQAGVAKDAKSVASDVPLYKDGEAKTDPAGLSSPHLPGTSSAAPDLEGPEFPVESVASRIQAEPDNLARASASPDRIPSLPQETVDQEPKDQKRKSFEQAASASFPEKKPRLEDRQSFRNTIESVHTEKPQPTKEEPKVPPIRIQLSRIKPPWVVKGQPTYQICPRIIPTTESSCRGWTGARTLADIKARALQVRGARGHHCHREAATTAIGGGGGPGGGGGGATDEGGGRGSSSGDGGEACGHPEPRGGPSTPGKCTSDLQRTQLLPPYPLNGEHTQAGTAMSRARREDLPSLRKEESCLLQRATVGLTDGLGDASQLPVAPTGDQPCQALPLLSSQTSVAERLVEQPQLHPDVRTECESGTTSWESDDEEQGPTVPADNGPIPSLVGDDTLEKGTGQALDSHPTMKDPVNVTPSSTPESSPTDCLQNRAFDDELGLGGSCPPMRESDTRQENLKTKALVSNSSLHWIPIPSNDEVVKQPKPESREHIPSVEPQVGEEWEKAAPTPPALPGDLTAEEGLDPLDSLTSLWTVPSRGGSDSNGSYCQQVDIEKLKINGDSEALSPHGESTDTASDFEGHLTEDSSEADTREAAVTKGSSVDKDEKPNWNQSAPLSKVNGDMRLVTRTDGMVAPQSWVSRVCAVRQKIPDSLLLASTEYQPRAVCLSMPGSSVEATNPLVMQLLQGSLPLEKVLPPAHDDSMSESPQVPLTKDQSHGSLRMGSLHGLGKNSGMVDGSSPSSLRALKEPLLPDSCETGTGLARIEATQAPGAPQKNCKAVPSFDSLHPVTNPITSSRKLEEMDSKEQFSSFSCEDQKEVRAMSQDSNSNAAPGKSPGDLTTSRTPRFSSPNVISFGPEQTGRALGDQSNVTGQGKKLFGSGNVAATLQRPRPADPMPLPAEIPPVFPSGKLGPSTNSMSGGVQTPREDWAPKPHAFVGSVKNEKTFVGGPLKANAENRKATGHSPLELVGHLEGMPFVMDLPFWKLPREPGKGLSEPLEPSSLPSQLSIKQAFYGKLSKLQLSSTSFNYSSSSPTFPKGLAGSVVQLSHKANFGASHSASLSLQMFTDSSTVESISLQCACSLKAMIMCQGCGAFCHDDCIGPSKLCVLCLVVR

SEQ ID NO: 1832 - protein, 365 aa, Homo sapiens
MSSSVEQKKGPTRQRKCGFCKSNRDKECGQLLISENQKVAAHHKCMLFSSALVSSHSDNESLGGFSIEDVQKEIKRGTKLMCSLCHCPGATIGCDVKTCHRTYHYHCALHDKAQIREKPSQGIYMVYCRKHKKTAHNSEADLEESFNEHELEPSSPKSKKKSRKGRPRKTNFKGLSEDTRSTSSHGTDEMESSSYRDRSPHRSSPSDTRPKCGFCHVGEEENEARGKLHIFNAKKAAAHYKCMLFSSGTVQLTTTSRAEFGDFDIKTVLQEIKRGKRMKCTLCSQPGATIGCEIKACVKTYHYHCGVQDKAKYIENMSRGIYKLYCKNHSGNDERDEEDEERESKSRGKVEIDQQQLTQQQLNGN

SEQ ID NO: 1833 - protein, 1304 aa, Homo sapiens
MAKIAKTHEDIEAQIREIQGKKAALDEAQGVGLDSTGYYDQEIYGGSDSRFAGYVTSIAATELEDDDDDYSSSTSLLGQKKPGYHAPVALLNDIPQSTEQYDPFAEHRPPKIADREDEYKKHRRTMIISPERLDPFADGGKTPDPKMNARTYMDVMREQHLTKEEREIRQQLAEKAKAGELKVVNGAAASQPPSKRKRRWDQTADQTPGATPKKLSSWDQAETPGHTPSLRWDETPGRAKGSETPGATPGSKIWDPTPSHTPAGAATPGRGDTPGHATPGHGGATSSARKNRWDETPKTERDTPGHGSGWAETPRTDRGGDSIGETPTPGASKRKSRWDETPASQMGGSTPVLTPGKTPIGTPAMNMATPTPGHIMSMTPEQLQAWRWEREIDERNRPLSDEELDAMFPEGYKVLPPPAGYVPIRTPARKLTATPTPLGGMTGFHMQTEDRTMKSVNDQPSGNLPFLKPDDIQYFDKLLVDVDESTLSPEEQKERKIMKLLLKIKNGTPPMRKAALRQITDKAREFGAGPLFNQILPLLMSPTLEDQERHLLVKVIDRILYKLDDLVRPYVHKILVVIEPLLIDEDYYARVEGREIISNLAKAAGLATMISTMRPDIDNMDEYVRNTTARAFAVVASALGIPSLLPFLKAVCKSKKSWQARHTGIKIVQQIAILMGCAILPHLRSLVEIIEHGLVDEQQKVRTISALAIAALAEAATPYGIESFDSVLKPLWKGIRQHRGKGLAAFLKAIGYLIPLMDAEYANYYTREVMLILIREFQSPDEEMKKIVLKVVKQCCGTDGVEANYIKTEILPPFFKHFWQHRMALDRRNYRQLVDTTVELANKVGAAEIISRIVDDLKDEAEQYRKMVMETIEKIMGNLGAADIDHKLEEQLIDGILYAFQEQTTEDSVMLNGFGTVVNALGKRVKPYLPQICGTVLWRLNNKSAKVRQQAADLISRTAVVMKTCQEEKLMGHLGVVLYEYLGEEYPEVLGSILGALKAIVNVIGMHKMTPPIKDLLPRLTPILKNRHEKVQENCIDLVGRIADRGAEYVSAREWMRICFELLELLKAHKKAIRRATVNTFGYIAKAIGPHDVLATLLNNLKVQERQNRVCTTVAIAIVAETCSPFTVLPALMNEYRVPELNVQNGVLKSLSFLFEYIGEMGKDYIYAVTPLLEDALMDRDLVHRQTASAVVQHMSLGVYGFGCEDSLNHLLNYVWPNVFETSPHVIQAVMGALEGLRVAIGPCRMLQYCLQGLFHPARKVRDVYWKIYNSIYIGSQDALIAHYPRIYNDDKNTYIRYELDYIL

SEQ ID NO: 1834 - protein, 21 aa, Artificial Sequence
  Synthetic Polypeptide
MALPVTALLLPLALLLHAARP

SEQ ID NO: 1835 - protein, 19 aa, Artificial Sequence
  Synthetic Polypeptide
MDWIWRILFLVGAATGAHS

SEQ ID NO: 1836 - protein, 107 aa, Artificial Sequence
  Synthetic Polypeptide
DIQMTQTTSSLSASLGDRVTISCRASQDISKYLNWYQQKPDGTVKLLIYHTSRLHSGVPSRFSGSGSGTDYSLTISNLEQEDIATYFCQQGNTLPYTFGGGTKLEIT

SEQ ID NO: 1837 - protein, 107 aa, Artificial Sequence
  Synthetic Polypeptide
EIVLTQSPATLSLSPGERATLSCRASQSVSSYLAWYQQKPGQAPRLLIYDASNRATGIPARFSGSGSGTDFTLTISSLEPEDFAVYYCQQRSNWPITFGQGTRLEIK

SEQ ID NO: 1838 - protein, 15 aa, Artificial Sequence
  Synthetic Polypeptide
GGGGSGGGGSGGGGS

SEQ ID NO: 1839 - protein, 120 aa, Artificial Sequence
  Synthetic Polypeptide
EVKLQESGPGLVAPSQSLSVTCTVSGVSLPDYGVSWIRQPPRKGLEWLGVIWGSETTYYNSALKSRLTIIKDNSKSQVFLKMNSLQTDDTAIYYCAKHYYYGGSYAMDYWGQGTSVTVSS

SEQ ID NO: 1840 - protein, 122 aa, Artificial Sequence
  Synthetic Polypeptide
EVQLVESGGGLVQPGRSLRLSCAASGFTFNDYAMHWVRQAPGKGLEWVSTISWNSGSIGYADSVKGRFTISRDNAKKSLYLQMNSLRAEDTALYYCAKDIQYGNYYYGMDVWGQGTTVTVSS

SEQ ID NO: 1841 - protein, 242 aa, Artificial Sequence
  Synthetic Polypeptide
DIQMTQTTSSLSASLGDRVTISCRASQDISKYLNWYQQKPDGTVKLLIYHTSRLHSGVPSRFSGSGSGTDYSLTISNLEQEDIATYFCQQGNTLPYTFGGGTKLEITGGGGSGGGGSGGGGSEVKLQESGPGLVAPSQSLSVTCTVSGVSLPDYGVSWIRQPPRKGLEWLGVIWGSETTYYNSALKSRLTIIKDNSKSQVFLKMNSLQTDDTAIYYCAKHYYYGGSYAMDYWGQGTSVTVSS

SEQ ID NO: 1842 - protein, 244 aa, Artificial Sequence
  Synthetic Polypeptide
EIVLTQSPATLSLSPGERATLSCRASQSVSSYLAWYQQKPGQAPRLLIYDASNRATGIPARFSGSGSGTDFTLTISSLEPEDFAVYYCQQRSNWPITFGQGTRLEIKGGGGSGGGGSGGGGSEVQLVESGGGLVQPGRSLRLSCAASGFTFNDYAMHWVRQAPGKGLEWVSTISWNSGSIGYADSVKGRFTISRDNAKKSLYLQMNSLRAEDTALYYCAKDIQYGNYYYGMDVWGQGTTVTVSS

SEQ ID NO: 1843 - protein, 10 aa, Artificial Sequence
  Synthetic Polypeptide
EQKLISEEDL

SEQ ID NO: 1844 - protein, 14 aa, Artificial Sequence
  Synthetic Polypeptide
GKPIPNPLLGLDST

SEQ ID NO: 1845 - protein, 22 aa, Artificial Sequence
  Synthetic Polypeptide
VKQTLNFDLLKLAGDVESNPGP

SEQ ID NO: 1846 - protein, 18 aa, Artificial Sequence
  Synthetic Polypeptide
EGRGSLLTCGDVEENPGP

SEQ ID NO: 1847 - protein, 18 aa, Artificial Sequence
  Synthetic Polypeptide
EGRGSLLTCGDVEENPGP

SEQ ID NO: 1848 - protein, 19 aa, Artificial Sequence
  Synthetic Polypeptide
ATNFSLLKQAGDVEENPGP

SEQ ID NO: 1849 - protein, 19 aa, Artificial Sequence
  Synthetic Polypeptide
ATNFSLLKQAGDVEQNPGP

SEQ ID NO: 1850 - protein, 20 aa, Artificial Sequence
  Synthetic Polypeptide
QCTNYALLKLAGDVESNPGP

SEQ ID NO: 1851 - protein, 4 aa, Artificial Sequence
  Synthetic Polypeptide
SGSG

SEQ ID NO: 1852 - protein, 4 aa, Artificial Sequence
  Synthetic Polypeptide
SGSG

SEQ ID NO: 1853 - protein, 4 aa, Artificial Sequence
  Synthetic Polypeptide
RAKR

SEQ ID NO: 1854 - protein, 72 aa, Artificial Sequence
  Synthetic Polypeptide
AKPTTTPAPRPPTPAPTIASQPLSLRPEACRPAAGGAVHTRGLDFACDIYIWAPLAGTCGVLLLSLVITLYC

SEQ ID NO: 1855 - protein, 226 aa, Artificial Sequence
  Synthetic Polypeptide
AKPTTTPAPRPPTPAPTIASQPLSLRPEACRPAAGGAVHTRGLDFACDIYIWAPLAGTCGVLLLSLVITLYCKRGRKKLLYIFKQPFMRPVQTTQEEDGCSCRFPEEEEGGCELRVKFSRSADAPAYQQGQNQLYNELNLGRREEYDVLDKRRGRDPEMGGKPRRKNPQEGLYNELQKDKMAEAYSEIGMKGERRRGKGHDGLYQGLSTATKDTYDALHMQALPPR

SEQ ID NO: 1856 - protein, 114 aa, Artificial Sequence
  Synthetic Polypeptide
AKPTTTPAPRPPTPAPTIASQPLSLRPEACRPAAGGAVHTRGLDFACDIYIWAPLAGTCGVLLLSLVITLYCKRGRKKLLYIFKQPFMRPVQTTQEEDGCSCRFPEEEEGGCEL

SEQ ID NO: 1857 - protein, 42 aa, Artificial Sequence
  Synthetic Polypeptide
KRGRKKLLYIFKQPFMRPVQTTQEEDGCSCRFPEEEEGGCEL

SEQ ID NO: 1858 - protein, 112 aa, Artificial Sequence
  Synthetic Polypeptide
RVKFSRSADAPAYQQGQNQLYNELNLGRREEYDVLDKRRGRDPEMGGKPRRKNPQEGLYNELQKDKMAEAYSEIGMKGERRRGKGHDGLYQGLSTATKDTYDALHMQALPPR

SEQ ID NO: 1859 - protein, 112 aa, Artificial Sequence; identical to SEQ ID NO: 1858
  Synthetic Polypeptide

SEQ ID NO: 1860 - protein, 108 aa, Artificial Sequence
  Synthetic Polypeptide
KIEVMYPPPYLDNEKSNGTIIHVKGKHLCPSPLFPGPSKPFWVLVVVGGVLACYSLLVTVAFIIFWVRSKRSRLLHSDYMNMTPRRPGPTRKHYQPYAPPRDFAAYRS

SEQ ID NO: 1861 - protein, 167 aa, Artificial Sequence
  Synthetic Polypeptide
KESSGGPDSPDTEPGSSAGPTQRPSDNSHNEHAPASQGLKAEHLYILIGVSVVFLFCLLLLVLFCLHRQNQIKQGPPRSKDEEQKPQQRPDLAVDVLERTADKATVNGLPEKDRETDTSALAAGSSQEVTYAQLDHWALTQRTARAVSPQSTKPMAESITYAAVARH

SEQ ID NO: 1862 - protein, 150 aa, Artificial Sequence
  Synthetic Polypeptide
FKIPIEELEDRVFVNCNTSITWVEGTVGTLLSDITRLDLGKRILDPRGIYRCNGTDIYKDKESTVQVHYRMCQSCVELDPATVAGIIVTDVIATLLLALGVFCFAGHETGRLSGAADTQALLRNDQVYQPLRDRDDAQYSHLGGNWARNK

SEQ ID NO: 1863 - protein, 150 aa, Artificial Sequence; identical to SEQ ID NO: 1862
  Synthetic Polypeptide

SEQ ID NO: 1864 - protein, 130 aa, Artificial Sequence
  Synthetic Polypeptide
DGNEEMGGITQTPYKVSISGTTVILTCPQYPGSEILWQHNDKNIGGDEDDKNIGSDEDHLSLKEFSELEQSGYYVCYPRGSKPEDANFYLYLRARVCENCMEMDVMSVATIVIVDICITGGLLLLVYYWS

SEQ ID NO: 1865 - protein, 55 aa, Artificial Sequence
  Synthetic Polypeptide
KNRKAKAKPVTRGAGAGGRQRGQNKERPPPVPNPDYEPIRKGQRDLYSGLNQRRI

SEQ ID NO: 1866 - protein, 185 aa, Artificial Sequence
  Synthetic Polypeptide
DGNEEMGGITQTPYKVSISGTTVILTCPQYPGSEILWQHNDKNIGGDEDDKNIGSDEDHLSLKEFSELEQSGYYVCYPRGSKPEDANFYLYLRARVCENCMEMDVMSVATIVIVDICITGGLLLLVYYWSKNRKAKAKPVTRGAGAGGRQRGQNKERPPPVPNPDYEPIRKGQRDLYSGLNQRRI

SEQ ID NO: 1867 - protein, 160 aa, Artificial Sequence
  Synthetic Polypeptide
QSIKGNHLVKVYDYQEDGSVLLTCDAEAKNITWFKDGKMIGFLTEDKKKWNLGSNAKDPRGMYQCKGSQNKSKPLQVYYRMCQNCIELNAATISGFLFAEIVSIFVLAVGVYFIAGQDGVRQSRASDKQTLLPNDQLYQPLKDREDDQYSHLQGNQLRRN

SEQ ID NO: 1868 - protein, 160 aa, Artificial Sequence; identical to SEQ ID NO: 1867
  Synthetic Polypeptide

SEQ ID NO: 1869 - protein, 130 aa, Artificial Sequence; identical to SEQ ID NO: 1864
  Synthetic Polypeptide

SEQ ID NO: 1870 - protein, 55 aa, Artificial Sequence; identical to SEQ ID NO: 1865
  Synthetic Polypeptide

SEQ ID NO: 1871 - protein, 185 aa, Artificial Sequence; identical to SEQ ID NO: 1866
  Synthetic Polypeptide

SEQ ID NO: 1872 - protein, 30 aa, Artificial Sequence
  Synthetic Polypeptide
QSFGLLDPKLCYLLDGILFIYGVILTALFL

SEQ ID NO: 1873 - protein, 113 aa, Artificial Sequence
  Synthetic Polypeptide
RVKFSRSADAPAYQQGQNQLYNELNLGRREEYDVLDKRRGRDPEMGGKPQRRKNPQEGLYNELQKDKMAEAYSEIGMKGERRRGKGHDGLYQGLSTATKDTYDALHMQALPPR

SEQ ID NO: 1874 - protein, 30 aa, Artificial Sequence; identical to SEQ ID NO: 1872
  Synthetic Polypeptide

SEQ ID NO: 1875 - protein, 113 aa, Artificial Sequence; identical to SEQ ID NO: 1873
  Synthetic Polypeptide

SEQ ID NO: 1876 - protein, 143 aa, Artificial Sequence
  Synthetic Polypeptide
QSFGLLDPKLCYLLDGILFIYGVILTALFLRVKFSRSADAPAYQQGQNQLYNELNLGRREEYDVLDKRRGRDPEMGGKPQRRKNPQEGLYNELQKDKMAEAYSEIGMKGERRRGKGHDGLYQGLSTATKDTYDALHMQALPPR

SEQ ID NO: 1877 - protein, 173 aa, Artificial Sequence
  Synthetic Polypeptide
GQPKANPTVTLFPPSSEELQANKATLVCLISDFYPGAVTVAWKADGSPVKAGVETTKPSKQSNNKYAASSYLSLTPEQWKSHRSYSCQVTHEGSTVEKTVAPTECSPIKTDVITMDPKDNCSKDANDTLLLQLTNTSAYYMYLLLLLKSVVYFAIITCCLLRRTAFCCNGEKS

SEQ ID NO: 1878 - protein, 159 aa, Artificial Sequence
  Synthetic Polypeptide
GQPKANPTVTLFPPSSEELQANKATLVCLISDFYPGAVTVAWKADGSPVKAGVETTKPSKQSNNKYAASSYLSLTPEQWKSHRSYSCQVTHEGSTVEKTVAPTECSGRADCGITSASYHQGVLSATILYEILLGKATLYAVLVSALVLMAMVKRKDSRG

SEQ ID NO: 1879 - protein, 159 aa, Artificial Sequence
  Synthetic Polypeptide
GQPKANPTVTLFPPSSEELQANKATLVCLISDFYPGAVTVAWKADGSPVKAGVETTKPSKQSNNKYAASSYLSLTPEQWKSHRSYSCQVTHEGSTVEKTVAPTECSGRADCGFTSESYQQGVLSATILYEILLGKATLYAVLVSALVLMAMVKRKDSRG

SEQ ID NO: 1880 - protein, 171 aa, Artificial Sequence
  Synthetic Polypeptide
ASTKGPSVFPLAPSSKSTSGGTAALGCLVKDYFPEPVTVSWNSGALTSGVHTFPAVLQSSGLYSLSSVVTVPSSSLGTQTYICNVNHKPSNTKVDKRVEPKSCEVKTDSTDHVKPKETENTKQPSKSCHKPKAIVHTEKVNMMSLTVLGLRMLFAKTVAVNFLLTAKLFFL

SEQ ID NO: 1881 - protein, 163 aa, Artificial Sequence
  Synthetic Polypeptide
ASTKGPSVFPLAPSSKSTSGGTAALGCLVKDYFPEPVTVSWNSGALTSGVHTFPAVLQSSGLYSLSSVVTVPSSSLGTQTYICNVNHKPSNTKVDKRVEPKSCIPEDTFFPSSDVPCDVKLVEKSFETDTNLNFQNLSVIGFRILLLKVAGFNLLMTLRLWSS

SEQ ID NO: 1882 - protein, 163 aa, Artificial Sequence
  Synthetic Polypeptide
ASTKGPSVFPLAPSSKSTSGGTAALGCLVKDYFPEPVTVSWNSGALTSGVHTFPAVLQSSGLYSLSSVVTVPSSSLGTQTYICNVNHKPSNTKVDKRVEPKSCIPEDTFFPSPESSCDVKLVEKSFETDTNLNFQNLSVIGFRILLLKVAGFNLLMTLRLWSS

SEQ ID NO: 1883 - protein, 141 aa, Artificial Sequence
  Synthetic Polypeptide
DIQNPDPAVYQLRDSKSSDKSVCLFTDFDSQTNVSQSKDSDVYITDKTVLDMRSMDFKSNSAVAWSNKSDFACANAFNNSIIPEDTFFPSPESSCDVKLVEKSFETDTNLNFQNLSVIGFRILLLKVAGFNLLMTLRLWSS

SEQ ID NO: 1884 - protein, 140 aa, Artificial Sequence
  Synthetic Polypeptide
IQNPDPAVYQLRDSKSSDKSVCLFTDFDSQTNVSQSKDSDVYITDKTVLDMRSMDFKSNSAVAWSNKSDFACANAFNNSIIPEDTFFPSPESSCDVKLVEKSFETDTNLNFQNLSVIGFRILLLKVAGFNLLMTLRLWSS

SEQ ID NO: 1885 - protein, 140 aa, Artificial Sequence
  Synthetic Polypeptide
IQNPDPAVYQLRDSKSSDKSVCLFTDFDSQTNVSQSKDSDVYITDKCVLDMRSMDFKSNSAVAWSNKSDFACANAFNNSIIPEDTFFPSSDVPCDVKLVEKSFETDTNLNFQNLSVIGFRILLLKVAGFNLLMTLRLWSS

SEQ ID NO: 1886 - protein, 140 aa, Artificial Sequence
  Synthetic Polypeptide
IQNPDPAVYQLRDSKSSDKSVCLFTDFDSQTNVSQSKDSDVYITDKCVLDMRSMDFKSNSAVAWSNKSDFACANAFNNSIIPEDTFFPSPESSCDVKLVEKSFETDTNLNFQNLSVIGFRILLLKVAGFNLLMTLRLWSS

SEQ ID NO: 1887 - protein, 239 aa, Artificial Sequence
  Synthetic Polypeptide
IQNPDPAVYQLRDSKSSDKSVCLFTDFDSQTNVSQSKDSDVYITDKTVLDMRSMDFKSNSAVAWSNKSDFACANAFNNSIIPEDTFFPSPESSCGTQSFGLLDPKLCYLLDGILFIYGVILTALFLRVKFSRSADAPAYQQGQNQLYNELNLGRREEYDVLDKRRGRDPEMGGKPQRRKNPQEGLYNELQKDKMAEAYSEIGMKGERRRGKGHDGLYQGLSTATKDTYDALHMQALPPR

SEQ ID NO: 1888 - protein, 177 aa, Artificial Sequence
  Synthetic Polypeptide
EDLNKVFPPEVAVFEPSEAEISHTQKATLVCLATGFFPDHVELSWWVNGKEVHSGVSTDPQPLKEQPALNDSRYCLSSRLRVSATFWQNPRNHFRCQVQFYGLSENDEWTQDRAKPVTQIVSAEAWGRADCGFTSVSYQQGVLSATILYEILLGKATLYAVLVSALVLMAMVKRKDF

SEQ ID NO: 1889 - protein, 179 aa, Artificial Sequence
  Synthetic Polypeptide
EDLKNVFPPEVAVFEPSEAEISHTQKATLVCLATGFYPDHVELSWWVNGKEVHSGVSTDPQPLKEQPALNDSRYCLSSRLRVSATFWQNPRNHFRCQVQFYGLSENDEWTQDRAKPVTQIVSAEAWGRADCGFTSESYQQGVLSATILYEILLGKATLYAVLVSALVLMAMVKRKDSRG

SEQ ID NO: 1890 - protein, 179 aa, Artificial Sequence; identical to SEQ ID NO: 1889
  Synthetic Polypeptide

SEQ ID NO: 1891 - protein, 179 aa, Artificial Sequence
  Synthetic Polypeptide
EDLKNVFPPEVAVFEPSEAEISHTQKATLVCLATGFYPDHVELSWWVNGKEVHSGVCTDPQPLKEQPALNDSRYCLSSRLRVSATFWQNPRNHFRCQVQFYGLSENDEWTQDRAKPVTQIVSAEAWGRADCGFTSESYQQGVLSATILYEILLGKATLYAVLVSALVLMAMVKRKDSRG

SEQ ID NO: 1892 - protein, 179 aa, Artificial Sequence
  Synthetic Polypeptide
EDLKNVFPPEVAVFEPSKAEIAHTQKATLVCLATGFYPDHVELSWWVNGKEVHSGVCTDPQPLKEQPALNDSRYCLSSRLRVSATFWQNPRNHFRCQVQFYGLSENDEWTQDRAKPVTQIVSAEAWGRADCGITSASYHQGVLSATILYEILLGKATLYAVLVSALVLMAMVKRKDSRG

SEQ ID NO: 1893 - protein, 276 aa, Artificial Sequence
  Synthetic Polypeptide
EDLKNVFPPEVAVFEPSEAEISHTQKATLVCLATGFYPDHVELSWWVNGKEVHSGVSTDPQPLKEQPALNDSRYCLSSRLRVSATFWQNPRNHFRCQVQFYGLSENDEWTQDRAKPVTQIVSAEAWGRADCGSQSFGLLDPKLCYLLDGILFIYGVILTALFLRVKFSRSADAPAYQQGQNQLYNELNLGRREEYDVLDKRRGRDPEMGGKPQRRKNPQEGLYNELQKDKMAEAYSEIGMKGERRRGKGHDGLYQGLSTATKDTYDALHMQALPPR

SEQ ID NO: 1894 - protein, 269 aa, Artificial Sequence
  Synthetic Polypeptide
GCPALPTGVGGTPFPSLAPPIMLLVDGKQQMVVVCLVLDVAPPGLDSPIWFSAGNGSALDAFTYGPSPATDGTWTNLAHLSLPSEELASWEPLVCHTGPGAEGHSRSTQPMHLSGEASTARTCPQEPLRGTPGGALWLGVLRLLLFKLLLFDLLLTCSCLCDPAGPLPSPATTTRLRALGSHRLHPATETGGREATSSPRPQPRDRRWGDTPPGRKPGSPVWGEGSYLSSYPTCPAQAWCSRSRLRAPSSSLGAFFAGDLPPPLQAGAA

SEQ ID NO: 1895 - protein, 258 aa, Artificial Sequence
  Synthetic Polypeptide
TPFPSLAPPIMLLVDGKQQMVVVCLVLDVAPPGLDSPIWFSAGNGSALDAFTYGPSPATDGTWTNLAHLSLPSEELASWEPLVCHTGPGAEGHSRSTQPMHLSGEASTARTCPQEPLRGTPGGALWLGVLRLLLFKLLLFDLLLTCSCLCDPAGPLPSPATTTRLRALGSHRLHPATETGGREATSSPRPQPRDRRWGDTPPGRKPGSPVWGEGSYLSSYPTCPAQAWCSRSALRAPSSSLGAFFAGDLPPPLQAGAA

SEQ ID NO: 1896 - protein, 210 aa, Artificial Sequence
  Synthetic Polypeptide
TPFPSLAPPIMLLVDGKQQMVVVCLVLDVAPPGLDSPIWFSAGNGSALDAFTYGPSPATDGTWTNLAHLSLPSEELASWEPLVCHTGPGAEGHSRSTQPMHLSGEASTARTCPQEPLRGTPGGALWLGVLRLLLFKLLLFDLLLTCSCLCDPAGPLPSPATTTRLRALGSHRLHPATETGGREATSSPRPQPRDRRWGDTPPGRKPGSPV

SEQ ID NO: 1897 - protein, 189 aa, Artificial Sequence
  Synthetic Polypeptide
DKQLDADVSPKPTIFLPSIAETKLQKAGTYLCLLEKFFPDIIKIHWQEKKSNTILGSQEGNTMKTNDTYMKFSWLTVPEESLDKEHRCIVRHENNKNGIDQEIIFPPIKTDVTTVDPKYNYSKDANDVITMDPKDNWSKDANDTLLLQLTNTSAYYMYLLLLLKSVVYFAIITCCLLGRTAFCCNGEKS

SEQ ID NO: 1898 - protein, 173 aa, Artificial Sequence
  Synthetic Polypeptide
DKQLDADVSPKPTIFLPSIAETKLQKAGTYLCLLEKFFPDVIKIHWQEKKSNTILGSQEGNTMKTNDTYMKFSWLTVPEKSLDKEHRCIVRHENNKNGVDQEIIFPPIKTDVITMDPKDNCSKDANDTLLLQLTNTSAYYMYLLLLLKSVVYFAIITCCLLRRTAFCCNGEKS

SEQ ID NO: 1899 - protein, 153 aa, Artificial Sequence
  Synthetic Polypeptide
SQPHTKPSVFVMKNGTNVACLVKEFYPKDIRINLVSSKKITEFDPAIVISPSGKYNAVKLGKYEDSNSVTCSVQHDNKTVHSTDFEVKTDSTDHVKPKETENTKQPSKSCHKPKAIVHTEKVNMMSLTVLGLRMLFAKTVAVNFLLTAKLFFL

SEQ ID NO: 1900 - protein, 153 aa, Artificial Sequence; identical to SEQ ID NO: 1899
  Synthetic Polypeptide

SEQ ID NO: 1901 - protein, 199 aa, Artificial Sequence
  Synthetic Polypeptide
MTEYKPTVRLATRDDVPRAVRTLAAAFADYPATRHTVDPDRHIERVTELQELFLTRVGLDIGKVWVADDGAAVAVWTTPESVEAGAVFAEIGPRMAELSGSRLAAQQQMEGLLAPHRPKEPAWFLATVGVSPDHQGKGLGSAVVLPGVEAAERAGVPAFLETSAPRNLPFYERLGFTVTADVEVPEGPRTWCMTRKPGA

SEQ ID NO: 1902 - protein, 132 aa, Artificial Sequence
  Synthetic Polypeptide
MAKPLSQEESTLIERATATINSIPISEDYSVASAALSSDGRIFTGVNVYHFTGGPCAELVVLGTAAAAAAGNLTCIVAIGNENRGILSPCGRCRQVLLDLHPGIKAIVKDSDGQPTAVGIRELLPSGYVWEG

SEQ ID NO: 1903 - protein, 718 aa, Artificial Sequence
  Synthetic Polypeptide
MALPVTALLLPLALLLHAARPDIQMTQTTSSLSASLGDRVTISCRASQDISKYLNWYQQKPDGTVKLLIYHTSRLHSGVPSRFSGSGSGTDYSLTISNLEQEDIATYFCQQGNTLPYTFGGGTKLEITGGGGSGGGGSGGGGSEVKLQESGPGLVAPSQSLSVTCTVSGVSLPDYGVSWIRQPPRKGLEWLGVIWGSETTYYNSALKSRLTIIKDNSKSQVFLKMNSLQTDDTAIYYCAKHYYYGGSYAMDYWGQGTSVTVSSRVEQKLISEEDLKIEVMYPPPYLDNEKSNGTIIHVKGKHLCPSPLFPGPSKPFWVLVVVGGVLACYSLLVTVAFIIFWVRSKRSRLLHSDYMNMTPRRPGPTRKHYQPYAPPRDFAAYRSRVKFSRSADAPAYQQGQNQLYNELNLGRREEYDVLDKRRGRDPEMGGKPRRKNPQEGLYNELQKDKMAEAYSEIGMKGERRRGKGHDGLYQGLSTATKDTYDALHMQALPPRSSGSGEGRGSLLTCGDVEENPGPHMTEYKPTVRLATRDDVPRAVRTLAAAFADYPATRHTVDPDRHIERVTELQELFLTRVGLDIGKVWVADDGAAVAVWTTPESVEAGAVFAEIGPRMAELSGSRLAAQQQMEGLLAPHRPKEPAWFLATVGVSPDHQGKGLGSAVVLPGVEAAERAGVPAFLETSAPRNLPFYERLGFTVTADVEVPEGPRTWCMTRKPGA

SEQ ID NO: 1904 - protein, 724 aa, Artificial Sequence
  Synthetic Polypeptide
MALPVTALLLPLALLLHAARPDIQMTQTTSSLSASLGDRVTISCRASQDISKYLNWYQQKPDGTVKLLIYHTSRLHSGVPSRFSGSGSGTDYSLTISNLEQEDIATYFCQQGNTLPYTFGGGTKLEITGGGGSGGGGSGGGGSEVKLQESGPGLVAPSQSLSVTCTVSGVSLPDYGVSWIRQPPRKGLEWLGVIWGSETTYYNSALKSRLTIIKDNSKSQVFLKMNSLQTDDTAIYYCAKHYYYGGSYAMDYWGQGTSVTVSSRVEQKLISEEDLAKPTTTPAPRPPTPAPTIASQPLSLRPEACRPAAGGAVHTRGLDFACDIYIWAPLAGTCGVLLLSLVITLYCKRGRKKLLYIFKQPFMRPVQTTQEEDGCSCRFPEEEEGGCELRVKFSRSADAPAYQQGQNQLYNELNLGRREEYDVLDKRRGRDPEMGGKPRRKNPQEGLYNELQKDKMAEAYSEIGMKGERRRGKGHDGLYQGLSTATKDTYDALHMQALPPRSSGSGEGRGSLLTCGDVEENPGPHMTEYKPTVRLATRDDVPRAVRTLAAAFADYPATRHTVDPDRHIERVTELQELFLTRVGLDIGKVWVADDGAAVAVWTTPESVEAGAVFAEIGPRMAELSGSRLAAQQQMEGLLAPHRPKEPAWFLATVGVSPDHQGKGLGSAVVLPGVEAAERAGVPAFLETSAPRNLPFYERLGFTVTADVEVPEGPRTWCMTRKPGA

SEQ ID NO: 1905 - protein, 727 aa, Artificial Sequence
  Synthetic Polypeptide
MALPVTALLLPLALLLHAARPDEIVLTQSPATLSLSPGERATLSCRASQSVSSYLAWYQQKPGQAPRLLIYDASNRATGIPARFSGSGSGTDFTLTISSLEPEDFAVYYCQQRSNWPITFGQGTRLEIKGGGGSGGGGSGGGGSEVQLVESGGGLVQPGRSLRLSCAASGFTFNDYAMHWVRQAPGKGLEWVSTISWNSGSIGYADSVKGRFTISRDNAKKSLYLQMNSLRAEDTALYYCAKDIQYGNYYYGMDVWGQGTTVTVSSTREQKLISEEDLAKPTTTPAPRPPTPAPTIASQPLSLRPEACRPAAGGAVHTRGLDFACDIYIWAPLAGTCGVLLLSLVITLYCKRGRKKLLYIFKQPFMRPVQTTQEEDGCSCRFPEEEEGGCELRVKFSRSADAPAYQQGQNQLYNELNLGRREEYDVLDKRRGRDPEMGGKPRRKNPQEGLYNELQKDKMAEAYSEIGMKGERRRGKGHDGLYQGLSTATKDTYDALHMQALPPRSSGSGEGRGSLLTCGDVEENPGPHMTEYKPTVRLATRDDVPRAVRTLAAAFADYPATRHTVDPDRHIERVTELQELFLTRVGLDIGKVWVADDGAAVAVWTTPESVEAGAVFAEIGPRMAELSGSRLAAQQQMEGLLAPHRPKEPAWFLATVGVSPDHQGKGLGSAVVLPGVEAAERAGVPAFLETSAPRNLPFYERLGFTVTADVEVPEGPRTWCMTRKPGA

SEQ ID NO: 1906 - protein, 882 aa, Artificial Sequence
  Synthetic Polypeptide
MALPVTALLLPLALLLHAARPDIQMTQTTSSLSASLGDRVTISCRASQDISKYLNWYQQKPDGTVKLLIYHTSRLHSGVPSRFSGSGSGTDYSLTISNLEQEDIATYFCQQGNTLPYTFGGGTKLEITLEGKPIPNPLLGLDSTGSGEDLKNVFPPEVAVFEPSKAEIAHTQKATLVCLATGFYPDHVELSWWVNGKEVHSGVCTDPQPLKEQPALNDSRYCLSSRLRVSATFWQNPRNHFRCQVQFYGLSENDEWTQDRAKPVTQIVSAEAWGRADCGITSASYHQGVLSATILYEILLGKATLYAVLVSALVLMAMVKRKDSRGRAKRSGSGATNFSLLKQAGDVEENPGPTSMDWIWRILFLVGAATGAHSFEVKLQESGPGLVAPSQSLSVTCTVSGVSLPDYGVSWIRQPPRKGLEWLGVIWGSETTYYNSALKSRLTIIKDNSKSQVFLKMNSLQTDDTAIYYCAKHYYYGGSYAMDYWGQGTSVTVSSTREQKLISEEDGSGIQNPDPAVYQLRDSKSSDKSVCLFTDFDSQTNVSQSKDSDVYITDKCVLDMRSMDFKSNSAVAWSNKSDFACANAFNNSIIPEDTFFPSSDVPCDVKLVEKSFETDTNLNFQNLSVIGFRILLLKVAGFNLLMTLRLWSSRAKRSGSGVKQTLNFDLLKLAGDVESNPGPSRGHMTEYKPTVRLATRDDVPRAVRTLAAAFADYPATRHTVDPDRHIERVTELQELFLTRVGLDIGKVWVADDGAAVAVWTTPESVEAGAVFAEIGPRMAELSGSRLAAQQQMEGLLAPHRPKEPAWFLATVGVSPDHQGKGLGSAVVLPGVEAAERAGVPAFLETSAPRNLPFYERLGFTVTADVEVPEGPRTWCMTRKPGA

SEQ ID NO: 1907 - protein, 886 aa, Artificial Sequence
  Synthetic Polypeptide
MALPVTALLLPLALLLHAARPDEIVLTQSPATLSLSPGERATLSCRASQSVSSYLAWYQQKPGQAPRLLIYDASNRATGIPARFSGSGSGTDFTLTISSLEPEDFAVYYCQQRSNWPITFGQGTRLEIKLEGKPIPNPLLGLDSTGSGEDLKNVFPPEVAVFEPSKAEIAHTQKATLVCLATGFYPDHVELSWWVNGKEVHSGVCTDPQPLKEQPALNDSRYCLSSRLRVSATFWQNPRNHFRCQVQFYGLSENDEWTQDRAKPVTQIVSAEAWGRADCGITSASYHQGVLSATILYEILLGKATLYAVLVSALVLMAMVKRKDSRGRAKRSGSGATNFSLLKQAGDVEENPGPTSMDWIWRILFLVGAATGAHSFEEVQLVESGGGLVQPGRSLRLSCAASGFTFNDYAMHWVRQAPGKGLEWVSTISWNSGSIGYADSVKGRFTISRDNAKKSLYLQMNSLRAEDTALYYCAKDIQYGNYYYGMDVWGQGTTVTVSSTREQKLISEEDGSGIQNPDPAVYQLRDSKSSDKSVCLFTDFDSQTNVSQSKDSDVYITDKCVLDMRSMDFKSNSAVAWSNKSDFACANAFNNSIIPEDTFFPSSDVPCDVKLVEKSFETDTNLNFQNLSVIGFRILLLKVAGFNLLMTLRLWSSRAKRSGSGVKQTLNFDLLKLAGDVESNPGPSRGHMTEYKPTVRLATRDDVPRAVRTLAAAFADYPATRHTVDPDRHIERVTELQELFLTRVGLDIGKVWVADDGAAVAVWTTPESVEAGAVFAEIGPRMAELSGSRLAAQQQMEGLLAPHRPKEPAWFLATVGVSPDHQGKGLGSAVVLPGVEAAERAGVPAFLETSAPRNLPFYERLGFTVTADVEVPEGPRTWCMTRKPGA

SEQ ID NO: 1908 - protein, 914 aa, Artificial Sequence
  Synthetic Polypeptide
MALPVTALLLPLALLLHAARPDIQMTQTTSSLSASLGDRVTISCRASQDISKYLNWYQQKPDGTVKLLIYHTSRLHSGVPSRFSGSGSGTDYSLTISNLEQEDIATYFCQQGNTLPYTFGGGTKLEITGGGGSGGGGSGGGGSEVKLQESGPGLVAPSQSLSVTCTVSGVSLPDYGVSWIRQPPRKGLEWLGVIWGSETTYYNSALKSRLTIIKDNSKSQVFLKMNSLQTDDTAIYYCAKHYYYGGSYAMDYWGQGTSVTVSSRVEQKLISEEDLAKPTTTPAPRPPTPAPTIASQPLSLRPEACRPAAGGAVHTRGLDFACDIYIWAPLAGTCGVLLLSLVITLYCGRARVKFSRSADAPAYQQGQNQLYNELNLGRREEYDVLDKRRGRDPEMGGKPRRKNPQEGLYNELQKDKMAEAYSEIGMKGERRRGKGHDGLYQGLSTATKDTYDALHMQALPPRSRGSGATNFSLLKQAGDVEENPGPGIHMATYEVLCEVARKLGTDDREVVLFLLNVFIPQPTLAQLIGALRALKEEGRLTFPLLAECLFRAGRRDLLRDLLHLDPRFLERHLAGTMSYFSPYQLTVLHVDGELCARDIRSLIFLSKDTIGSRSTPQTFLHWVYCMENLDLLGPTDVDALMSMLRSLSRVDLQRQVQTLMGLHLSGPSHSQHYRHTPLETDFYDYKDDDDKTSGSGEGRGSLLTCGDVEENPGPHMTEYKPTVRLATRDDVPRAVRTLAAAFADYPATRHTVDPDRHIERVTELQELFLTRVGLDIGKVWVADDGAAVAVWTTPESVEAGAVFAEIGPRMAELSGSRLAAQQQMEGLLAPHRPKEPAWFLATVGVSPDHQGKGLGSAVVLPGVEAAERAGVPAFLETSAPRNLPFYERLGFTVTADVEVPEGPRTWCMTRKPGA

SEQ ID NO: 1909 - protein, 917 aa, Artificial Sequence
  Synthetic Polypeptide
MALPVTALLLPLALLLHAARPDEIVLTQSPATLSLSPGERATLSCRASQSVSSYLAWYQQKPGQAPRLLIYDASNRATGIPARFSGSGSGTDFTLTISSLEPEDFAVYYCQQRSNWPITFGQGTRLEIKGGGGSGGGGSGGGGSEVQLVESGGGLVQPGRSLRLSCAASGFTFNDYAMHWVRQAPGKGLEWVSTISWNSGSIGYADSVKGRFTISRDNAKKSLYLQMNSLRAEDTALYYCAKDIQYGNYYYGMDVWGQGTTVTVSSTREQKLISEEDLAKPTTTPAPRPPTPAPTIASQPLSLRPEACRPAAGGAVHTRGLDFACDIYIWAPLAGTCGVLLLSLVITLYCGRARVKFSRSADAPAYQQGQNQLYNELNLGRREEYDVLDKRRGRDPEMGGKPRRKNPQEGLYNELQKDKMAEAYSEIGMKGERRRGKGHDGLYQGLSTATKDTYDALHMQALPPRSRGSGATNFSLLKQAGDVEENPGPGIHMATYEVLCEVARKLGTDDREVVLFLLNVFIPQPTLAQLIGALRALKEEGRLTFPLLAECLFRAGRRDLLRDLLHLDPRFLERHLAGTMSYFSPYQLTVLHVDGELCARDIRSLIFLSKDTIGSRSTPQTFLHWVYCMENLDLLGPTDVDALMSMLRSLSRVDLQRQVQTLMGLHLSGPSHSQHYRHTPLETDFYDYKDDDDKTSGSGEGRGSLLTCGDVEENPGPHMTEYKPTVRLATRDDVPRAVRTLAAAFADYPATRHTVDPDRHIERVTELQELFLTRVGLDIGKVWVADDGAAVAVWTTPESVEAGAVFAEIGPRMAELSGSRLAAQQQMEGLLAPHRPKEPAWFLATVGVSPDHQGKGLGSAVVLPGVEAAERAGVPAFLETSAPRNLPFYERLGFTVTADVEVPEGPRTWCMTRKPGA

SEQ ID NO: 1910 - protein, 11 aa, Artificial Sequence
  Synthetic Polypeptide
WSHPQFEKGSG

SEQ ID NO: 1911 - protein, 1649 aa, Artificial Sequence
  Synthetic Polypeptide
MALPVTALLLPLALLLHAARPDIQMTQTTSSLSASLGDRVTISCRASQDISKYLNWYQQKPDGTVKLLIYHTSRLHSGVPSRFSGSGSGTDYSLTISNLEQEDIATYFCQQGNTLPYTFGGGTKLEITGGGGSGGGGSGGGGSEVKLQESGPGLVAPSQSLSVTCTVSGVSLPDYGVSWIRQPPRKGLEWLGVIWGSETTYYNSALKSRLTIIKDNSKSQVFLKMNSLQTDDTAIYYCAKHYYYGGSYAMDYWGQGTSVTVSSRVEQKLISEEDLAKPTTTPAPRPPTPAPTIASQPLSLRPEACRPAAGGAVHTRGLDFACDIYIWAPLAGTCGVLLLSLVITLYCKRGRKKLLYIFKQPFMRPVQTTQEEDGCSCRFPEEEEGGCELRVKFSRSADAPAYQQGQNQLYNELNLGRREEYDVLDKRRGRDPEMGGKPRRKNPQEGLYNELQKDKMAEAYSEIGMKGERRRGKGHDGLYQGLSTATKDTYDALHMQALPPRSSGSGEGRGSLLTCGDVEENPGPHMAPPSEETPLIPQRSCSLLSTEAGALHVLLPARGPGPPQRLSFSFGDHLAEDLCVQAAKASGILPVYHSLFALATEDLSCWFPPSHIFSVEDASTQVLLYRIRFYFPNWFGLEKCHRFGLRKDLASAILDLPVLEHLFAQHRSDLVSGRLPVGLSLKEQGECLSLAVLDLARMAREQAQRPGELLKTVSYKACLPPSLRDLIQGLSFVTRRRIRRTVRRALRRVAACQADRHSLMAKYIMDLERLDPAGAAETFHVGLPGALGGHDGLGLLRVAGDGGIAWTQGEQEVLQPFCDFPEIVDISIKQAPRVGPAGEHRLVTVTRTDNQILEAEFPGLPEALSFVALVDGYFRLTTDSQHFFCKEVAPPRLLEEVAEQCHGPITLDFAINKLKTGGSRPGSYVLRRSPQDFDSFLLTVCVQNPLGPDYKGCLIRRSPTGTFLLVGLSRPHSSLRELLATCWDGGLHVDGVAVTLTSCCIPRPKEKSNLIVVQRGHSPPTSSLVQPQSQYQLSQITFHKIPADSLEWHENLGHGSFTKIYRGCRHEVVDGEARKTEVLLKVMDAKHKNCMESFLEAASLMSQVSYRHLVLLHGVCMAGDSTMVQEFVHLGAIDMYLRKRGHLVPASWKLQVVKQLAYALNYLEDKGLPHGNVSARKVLLAREGADGSPPFIKLSDPGVSPAVLSLEMLTDRIPWVAPECLREAQTLSLEADKWGFGATVWEVFSGVTMPISALDPAKKLQFYEDRQQLPAPKWTELALLIQQCMAYEPVQRPSFRAVIRDLNSLISSDYELLSDPTPGALAPRDGLWNGAQLYACQDPTIFEERHLKYISQLGKGNFGSVELCRYDPLGDNTGALVAVKQLQHSGPDQQRDFQREIQILKALHSDFIVKYRGVSYGPGRQSLRLVMEYLPSGCLRDFLQRHRARLDASRLLLYSSQICKGMEYLGSRRCVHRDLAARNILVESEAHVKIADFGLAKLLPLDKDYYVVREPGQSPIFWYAPESLSDNIFSRQSDVWSFGVVLYELFTYCDKSCSPSAEFLRMMGCERDVPALCRLLELLEEGQRLPAPPACPAEVHELMKLCWAPSPQDRPSFSALGPQLDMLWSGSRGCETHAFTAHPEGKHHSLSFS

SEQ ID NO: 1912 - protein, 1649 aa, Artificial Sequence
  Synthetic Polypeptide
MALPVTALLLPLALLLHAARPDIQMTQTTSSLSASLGDRVTISCRASQDISKYLNWYQQKPDGTVKLLIYHTSRLHSGVPSRFSGSGSGTDYSLTISNLEQEDIATYFCQQGNTLPYTFGGGTKLEITGGGGSGGGGSGGGGSEVKLQESGPGLVAPSQSLSVTCTVSGVSLPDYGVSWIRQPPRKGLEWLGVIWGSETTYYNSALKSRLTIIKDNSKSQVFLKMNSLQTDDTAIYYCAKHYYYGGSYAMDYWGQGTSVTVSSRVEQKLISEEDLAKPTTTPAPRPPTPAPTIASQPLSLRPEACRPAAGGAVHTRGLDFACDIYIWAPLAGTCGVLLLSLVITLYCKRGRKKLLYIFKQPFMRPVQTTQEEDGCSCRFPEEEEGGCELRVKFSRSADAPAYQQGQNQLYNELNLGRREEYDVLDKRRGRDPEMGGKPRRKNPQEGLYNELQKDKMAEAYSEIGMKGERRRGKGHDGLYQGLSTATKDTYDALHMQALPPRSSGSGEGRGSLLTCGDVEENPGPHMAPPSEETPLIPQRSCSLLSTEAGALHVLLPARGPGPPQRLSFSFGDHLAEDLCVQAAKASGILPVYHSLFALATEDLSCWFPPSHIFSVEDASTQVLLYRIRFYFPNWFGLEKCHRFGLRKDLASAILDLPVLEHLFAQHRSDLVSGRLPVGLSLKEQGECLSLAVLDLARMAREQAQRPGELLKTVSYKACLPPSLRDLIQGLSFVTRRRIRRTVRRALRRVAACQADRHSLMAKYIMDLERLDPAGAAETFHVGLPGALGGHDGLGLLRVAGDGGIAWTQGEQEVLQPFCDFPEIVDISIKQAPRVGPAGEHRLVTVTRTDNQILEAEFPGLPEALSFVALVDGYFRLTTDSQHFFCKEVAPPRLLEEVAEQCHGPITLDFAINKLKTGGSRPGSYVLRRSPQDFDSFLLTVCVQNPLGPDYKGCLIRRSPTGTFLLVGLSRPHSSLRELLATCWDGGLHVDGVAVTLTSCCIPRPKEKSNLIVVQRGHSPPTSSLVQPQSQYQLSQMTFHKIPADSLEWHENLGHGSFTKIYRGCRHEVVDGEARKTEVLLKVMDAKHKNCMESFLEAVSLMSQVSYRHLVLLHGVCMAGDSTMVQEFVHLGAIDMYLRKRGHLVPASWKLQVVKQLAYALNYLEDKGLPHGNVSARKVLLAREGADGSPPFIKLSDPGVSPAVLSLEMLTDRIPWVAPECLREAQTLSLEADKWGFGATVWEVFSGVTMPISALDPAKKLQFYEDRQQLPAPKWTELALLIQQCMAYEPVQRPSFRAVIRDLNSLISSDYELLSDPTPGALAPRDGLWNGAQLYACQDPTIFEERHLKYISQLGKGNFGSVELCRYDPLGDNTGALVAVKQLQHSGPDQQRDFQREIQILKALHSDFIVKYRGVSYGPGRQSLRLVMEYLPSGCLRDFLQRHRARLDASRLLLYSSQICKGMEYLGSRRCVHRDLAARNILVESEAHVKIADFGLAKLLPLDKDYYVVREPGQSPIFWYAPESLSDNIFSRQSDVWSFGVVLYELFTYCDKSCSPSAEFLRMMGCERDVPALCRLLELLEEGQRLPAPPACPAEVHELMKLCWAPSPQDRPSFSALGPQLDMLWSGSRGCETHAFTAHPEGKHHSLSFS

SEQ ID NO: 1913 - protein, 1311 aa, Artificial Sequence
  Synthetic Polypeptide
MALPVTALLLPLALLLHAARPDIQMTQTTSSLSASLGDRVTISCRASQDISKYLNWYQQKPDGTVKLLIYHTSRLHSGVPSRFSGSGSGTDYSLTISNLEQEDIATYFCQQGNTLPYTFGGGTKLEITGGGGSGGGGSGGGGSEVKLQESGPGLVAPSQSLSVTCTVSGVSLPDYGVSWIRQPPRKGLEWLGVIWGSETTYYNSALKSRLTIIKDNSKSQVFLKMNSLQTDDTAIYYCAKHYYYGGSYAMDYWGQGTSVTVSSRVEQKLISEEDLAKPTTTPAPRPPTPAPTIASQPLSLRPEACRPAAGGAVHTRGLDFACDIYIWAPLAGTCGVLLLSLVITLYCKRGRKKLLYIFKQPFMRPVQTTQEEDGCSCRFPEEEEGGCELRVKFSRSADAPAYQQGQNQLYNELNLGRREEYDVLDKRRGRDPEMGGKPRRKNPQEGLYNELQKDKMAEAYSEIGMKGERRRGKGHDGLYQGLSTATKDTYDALHMQALPPRSSGSGEGRGSLLTCGDVEENPGPHMAMWIQAQQLQGDALHQMQALYGQHFPIEVRHYLSQWIESQAWDSIDLDNPQENIKATQLLEGLVQELQKKAEHQVGEDGFLLKIKLGHYATQLQSTYDRCPMELVRCIRHILYNEQRLVREANNGSSPAGSLADAMSQKHLQINQTFEELRLITQDTENELKKLQQTQEYFIIQYQESLRIQAQFAQLGQLNPQERMSRETALQQKQVSLETWLQREAQTLQQYRVELAEKHQKTLQLLRKQQTIILDDELIQWKRRQQLAGNGGPPEGSLDVLQSWCEKLAEIIWQNRQQIRRAEHLCQQLPIPGPVEEMLAEVNATITDIISALVTSTFIIEKQPPQVLKTQTKFAATVRLLVGGKLNVHMNPPQVKATIISEQQAKSLLKNENTRNDYSGEILNNCCVMEYHQATGTLSAHFRNMSLKRIKRSDRRGAESVTEEKFTILFDSQFSVGGNELVFQVKTLSLPVVVIVHGSQDNNATATVLWDNAFAEPGRVPFAVPDKVLWPQLCEALNMKFKAEVQSNRGLTKENLVFLAQKLFNISSNHLEDYNSMSVSWSQFNRENLPGRNYTFWQWFDGVMEVLKKHLKPHWNDGAILGFVNKQQAHDLLINKPDGTFLLRFSDSEIGGISIAWKFDSQERMFWNLMPFTTRDFSIRSLADRLGDLNYLIYVFPDRPKDEVYSKYYTPVPCEPATAKAADGYVKPQIKQVVPEFANASTDAGSGATYMDQAPSPVVCPQAHYNMYPPNPDSVLDTDGDFDLEDTMDVARRVEELLGRPMDSQWIPHAQS

SEQ ID NO: 1914 - protein, 1679 aa, Artificial Sequence
  Synthetic Polypeptide
MALPVTALLLPLALLLHAARPDIQMTQTTSSLSASLGDRVTISCRASQDISKYLNWYQQKPDGTVKLLIYHTSRLHSGVPSRFSGSGSGTDYSLTISNLEQEDIATYFCQQGNTLPYTFGGGTKLEITGGGGSGGGGSGGGGSEVKLQESGPGLVAPSQSLSVTCTVSGVSLPDYGVSWIRQPPRKGLEWLGVIWGSETTYYNSALKSRLTIIKDNSKSQVFLKMNSLQTDDTAIYYCAKHYYYGGSYAMDYWGQGTSVTVSSRVEQKLISEEDLAKPTTTPAPRPPTPAPTIASQPLSLRPEACRPAAGGAVHTRGLDFACDIYIWAPLAGTCGVLLLSLVITLYCKRGRKKLLYIFKQPFMRPVQTTQEEDGCSCRFPEEEEGGCELRVKFSRSADAPAYQQGQNQLYNELNLGRREEYDVLDKRRGRDPEMGGKPRRKNPQEGLYNELQKDKMAEAYSEIGMKGERRRGKGHDGLYQGLSTATKDTYDALHMQALPPRSSGSGEGRGSLLTCGDVEENPGPHMQYLNIKEDCNAMAFCAKMRSSKKTEVNLEAPEPGVEVIFYLSDREPLRLGSGEYTAEELCIRAAQACRISPLCHNLFALYDENTKLWYAPNRTITVDDKMSLRLHYRMRFYFTNWHGTNDNEQSVWRHSPKKQKNGYEKKKIPDATPLLDASSLEYLFAQGQYDLVKCLAPIRDPKTEQDGHDIENECLGMAVLAISHYAMMKKMQLPELPKDISYKRYIPETLNKSIRQRNLLTRMRINNVFKDFLKEFNNKTICDSSVSTHDLKVKYLATLETLTKHYGAEIFETSMLLISSENEMNWFHSNDGGNVLYYEVMVTGNLGIQWRHKPNVVSVEKEKNKLKRKKLENKHKKDEEKNKIREEWNNFSYFPEITHIVIKESVVSINKQDNKKMELKLSSHEEALSFVSLVDGYFRLTADAHHYLCTDVAPPLIVHNIQNGCHGPICTEYAINKLRQEGSEEGMYVLRWSCTDFDNILMTVTCFEKSEQVQGAQKQFKNFQIEVQKGRYSLHGSDRSFPSLGDLMSHLKKQILRTDNISFMLKRCCQPKPREISNLLVATKKAQEWQPVYPMSQLSFDRILKKDLVQGEHLGRGTRTHIYSGTLMDYKDDEGTSEEKKIKVILKVLDPSHRDISLAFFEAASMMRQVSHKHIVYLYGVCFRDVENIMVEEFVEGGPLDLFMHRKSDVLTTPWKFKVAKQLASALSYLEDKDLVHGNVCTKNLLLAREGIDSECGPFIKLSDPGIPITVLSRQECIERIPWIAPECVEDSKNLSVAADKWSFGTTLWEICYNGEIPLKDKTLIEKERFYESRCRPVTPSCKELADLMTRCMNYDPNQRPFFRAIMRDINKLEEQNPDIVSEKKPATEVDPTHFEKRFLKRIRDLGEGHFGKVELCRYDPEGDNTGEQVAVKSLKPESGGNHIADLKKEIEILRNLYHENIVKYKGICTEDGGNGIKLIMEFLPSGSLKEYLPKNKNKINLKQQLKYAVQICKGMDYLGSRQYVHRDLAARNVLVESEHQVKIGDFGLTKAIETDKEYYTVKDDRDSPVFWYAPECLMQSKFYIASDVWSFGVTLHELLTYCDSDSSPMALFLKMIGPTHGQMTVTRLVNTLKEGKRLPCPPNCPDEVYQLMRKCWEFQPSNRTSFQNLIEGFEALLK

SEQ ID NO: 1915 - protein, 1679 aa, Artificial Sequence
  Synthetic Polypeptide
MALPVTALLLPLALLLHAARPDIQMTQTTSSLSASLGDRVTISCRASQDISKYLNWYQQKPDGTVKLLIYHTSRLHSGVPSRFSGSGSGTDYSLTISNLEQEDIATYFCQQGNTLPYTFGGGTKLEITGGGGSGGGGSGGGGSEVKLQESGPGLVAPSQSLSVTCTVSGVSLPDYGVSWIRQPPRKGLEWLGVIWGSETTYYNSALKSRLTIIKDNSKSQVFLKMNSLQTDDTAIYYCAKHYYYGGSYAMDYWGQGTSVTVSSRVEQKLISEEDLAKPTTTPAPRPPTPAPTIASQPLSLRPEACRPAAGGAVHTRGLDFACDIYIWAPLAGTCGVLLLSLVITLYCKRGRKKLLYIFKQPFMRPVQTTQEEDGCSCRFPEEEEGGCELRVKFSRSADAPAYQQGQNQLYNELNLGRREEYDVLDKRRGRDPEMGGKPRRKNPQEGLYNELQKDKMAEAYSEIGMKGERRRGKGHDGLYQGLSTATKDTYDALHMQALPPRSSGSGEGRGSLLTCGDVEENPGPHMPGGGPEMDDYMETLKDEEDALWENVECNRHMLSRYINPAKLTPYLRQCKVIDEQDEDEVLNAPMLPSKINRAGRLLDILHTKGQRGYVVFLESLEFYYPELYKLVTGKEPTRRFSTIVVEEGHEGLTHFLMNEVIKLQQQMKAKDLQRCELLARLRQLEDEKKQMTLTRVELLTFQERYYKMKEERDSYNDELVKVKDDNYNLAMRYAQLSEEKNMAVMRSRDLQLEIDQLKHRLNKMEEECKLERNQSLKLKNDIENRPKKEQVLELERENEMLKTKNQELQSIIQAGKRSLPDSDKAILDILEHDRKEALEDRQELVNRIYNLQEEARQAEELRDKYLEEKEDLELKCSTLGKDCEMYKHRMNTVMLQLEEVERERDQAFHSRDEAQTQYSQCLIEKDKYRKQIRELEEKNDEMRIEMVRREACIVNLESKLRRLSKDSNNLDQSLPRNLPVTIISQDFGDASPRTNGQEADDSSTSEESPEDSKYFLPYHPPQRRMNLKGIQLQRAKSPISLKRTSDFQAKGHEEEGTDASPSSCGSLPITNSFTKMQPPRSRSSIMSITAEPPGNDSIVRRYKEDAPHRSTVEEDNDSGGFDALDLDDDSHERYSFGPSFIHSSSSSHQSEGLDAYDLEQVNLMFRKFSLERPFRPSVTSVGHVRGPGPSVQHTTLNGDSLTSQLTLLGGNARGSFVHSVKPGSLAEKAGLREGHQLLLLEGCIRGERQSVPLDTCTKEEAHWTIQRCSGPVTLHYKVNHEGYRKLVKDMEDGLITSGDSFYIRLNLNISSQLDACTMSLKCDDVVHVRDTMYQDRHEWLCARVDPFTDHDLDMGTIPSYSRAQQLLLVKLQRLMHRGSREEVDGTHHTLRALRNTLQPEEALSTSDPRVSPRLSRASFLFGQLLQFVSRSENKYKRMNSNERVRIISGSPLGSLARSSLDATKLLTEKQEELDPESELGKNLSLIPYSLVRAFYCERRRPVLFTPTVLAKTLVQRLLNSGGAMEFTICKSDIVTRDEFLRRQKTETIIYSREKNPNAFECIAPANIEAVAAKNKHCLLEAGIGCTRDLIKSNIYPIVLFIRVCEKNIKRFRKLLPRPETEEEFLRVCRLKEKELEALPCLYATVEPDMWGSVEELLRVVKDKIGEEQRKTIWVDEDQL

SEQ ID NO: 1916 - protein, 1294 aa, Artificial Sequence
  Synthetic Polypeptide
MALPVTALLLPLALLLHAARPDIQMTQTTSSLSASLGDRVTISCRASQDISKYLNWYQQKPDGTVKLLIYHTSRLHSGVPSRFSGSGSGTDYSLTISNLEQEDIATYFCQQGNTLPYTFGGGTKLEITGGGGSGGGGSGGGGSEVKLQESGPGLVAPSQSLSVTCTVSGVSLPDYGVSWIRQPPRKGLEWLGVIWGSETTYYNSALKSRLTIIKDNSKSQVFLKMNSLQTDDTAIYYCAKHYYYGGSYAMDYWGQGTSVTVSSRVEQKLISEEDLAKPTTTPAPRPPTPAPTIASQPLSLRPEACRPAAGGAVHTRGLDFACDIYIWAPLAGTCGVLLLSLVITLYCKRGRKKLLYIFKQPFMRPVQTTQEEDGCSCRFPEEEEGGCELRVKFSRSADAPAYQQGQNQLYNELNLGRREEYDVLDKRRGRDPEMGGKPRRKNPQEGLYNELQKDKMAEAYSEIGMKGERRRGKGHDGLYQGLSTATKDTYDALHMQALPPRSSGSGEGRGSLLTCGDVEENPGPHMAQWNQLQQLDTRYLEQLHQLYSDSFPMELRQFLAPWIESQDWAYAASKESHATLVFHNLLGEIDQQYSRFLQESNVLYQHNLRRIKQFLQSRYLEKPMEIARIVARCLWEESRLLQTAATAAQQGGQANHPTAAVVTEKQQMLEQHLQDVRKRVQDLEQKMKVVENLQDDFDFNYKTLKSQGDMQDLNGNNQSVTRQKMQQLEQMLTALDQMRRSIVSELAGLLSAMEYVQKTLTDEELADWKRRQQIACIGGPPNICLDRLENWITSLAESQLQTRQQIKKLEELQQKVSYKGDPIVQHRPMLEERIVELFRNLMKSAFVVERQPCMPMHPDRPLVIKTGVQFTTKVRLLVKFPELNYQLKIKVCIDKDSGDVAALRGSRKFNILGTNTKVMNMEESNNGSLSAEFKHLTLREQRCGNGGRANCDASLIVTEELHLITFETEVYHQGLKIDLETHSLPVVVISNICQMPNAWASILWYNMLTNNPKNVNFFTKPPIGTWDQVAEVLSWQFSSTTKRGLSIEQLTTLAEKLLGPGVNYSGCQITWAKFCKENMAGKGFSFWVWLDNIIDLVKKYILALWNEGYIMGFISKERERAILSTKPPGTFLLRFSESSKEGGVTFTWVEKDISGKTQIQSVEPFTKQQLNNMSFAEIIMGYKIMDATNILVSPLVYLYPDIPKEEAFGKYCRPESQEHPEADPGAAPYLKTKFICVTPTTCSNTIDLPMSPRTLDSLMQFGNNGEGAEPSAGGQFESLTFDMELTSECATSPM

SEQ ID NO: 1917 - protein, 1291 aa, Artificial Sequence
  Synthetic Polypeptide
MALPVTALLLPLALLLHAARPDIQMTQTTSSLSASLGDRVTISCRASQDISKYLNWYQQKPDGTVKLLIYHTSRLHSGVPSRFSGSGSGTDYSLTISNLEQEDIATYFCQQGNTLPYTFGGGTKLEITGGGGSGGGGSGGGGSEVKLQESGPGLVAPSQSLSVTCTVSGVSLPDYGVSWIRQPPRKGLEWLGVIWGSETTYYNSALKSRLTIIKDNSKSQVFLKMNSLQTDDTAIYYCAKHYYYGGSYAMDYWGQGTSVTVSSRVEQKLISEEDLAKPTTTPAPRPPTPAPTIASQPLSLRPEACRPAAGGAVHTRGLDFACDIYIWAPLAGTCGVLLLSLVITLYCKRGRKKLLYIFKQPFMRPVQTTQEEDGCSCRFPEEEEGGCELRVKFSRSADAPAYQQGQNQLYNELNLGRREEYDVLDKRRGRDPEMGGKPRRKNPQEGLYNELQKDKMAEAYSEIGMKGERRRGKGHDGLYQGLSTATKDTYDALHMQALPPRSSGSGEGRGSLLTCGDVEENPGPHMAALSGGGGGGAEPGQALFNGDMEPEAGAGAGAAASSAADPAIPEEVWNIKQMIKLTQEHIEALLDKFGGEHNPPSIYLEAYEEYTSKLDALQQREQQLLESLGNGTDFSVSSSASMDTVTSSSSSSLSVLPSSLSVFQNPTDVARSNPKSPQKPIVRVFLPNKQRTVVPARCGVTVRDSLKKALMMRGLIPECCAVYRIQDGEKKPIGWDTDISWLTGEELHVEVLENVPLTTHNFVRKTFFTLAFCDFCRKLLFQGFRCQTCGYKFHQRCSTEVPLMCVNYDQLDLLFVSKFFEHHPIPQEEASLAETALTSGSSPSAPASDSIGPQILTSPSPSKSIPIPQPFRPADEDHRNQFGQRDRSSSAPNVHINTIEPVNIDDLIRDQGFRGDGGSTTGLSATPPASLPGSLTNVKALQKSPGPQRERKSSSSSEDRNRMKTLGRRDSSDDWEIPDGQITVGQRIGSGSFGTVYKGKWHGDVAVKMLNVTAPTPQQLQAFKNEVGVLRKTRHVNILLFMGYSTKPQLAIVTQWCEGSSLYHHLHIIETKFEMIKLIDIARQTAQGMDYLHAKSIIHRDLKSNNIFLHEDLTVKIGDFGLATEKSRWSGSHQFEQLSGSILWMAPEVIRMQDKNPYSFQSDVYAFGIVLYELMTGQLPYSNINNRDQIIFMVGRGYLSPDLSKVRSNCPKAMKRLMAECLKKKRDERPLFPQILASIELLARSLPKIHRSASEPSLNRAGFQTEDFSLYACASPKTPIQAGGYGAFPVH

SEQ ID NO: 1918 - protein, 1807 aa, Artificial Sequence
  Synthetic Polypeptide
MALPVTALLLPLALLLHAARPDIQMTQTTSSLSASLGDRVTISCRASQDISKYLNWYQQKPDGTVKLLIYHTSRLHSGVPSRFSGSGSGTDYSLTISNLEQEDIATYFCQQGNTLPYTFGGGTKLEITLEGKPIPNPLLGLDSTGSGEDLKNVFPPEVAVFEPSKAEIAHTQKATLVCLATGFYPDHVELSWWVNGKEVHSGVCTDPQPLKEQPALNDSRYCLSSRLRVSATFWQNPRNHFRCQVQFYGLSENDEWTQDRAKPVTQIVSAEAWGRADCGITSASYHQGVLSATILYEILLGKATLYAVLVSALVLMAMVKRKDSRGRAKRSGSGATNFSLLKQAGDVEENPGPTSMDWIWRILFLVGAATGAHSFEVKLQESGPGLVAPSQSLSVTCTVSGVSLPDYGVSWIRQPPRKGLEWLGVIWGSETTYYNSALKSRLTIIKDNSKSQVFLKMNSLQTDDTAIYYCAKHYYYGGSYAMDYWGQGTSVTVSSTREQKLISEEDGSGIQNPDPAVYQLRDSKSSDKSVCLFTDFDSQTNVSQSKDSDVYITDKCVLDMRSMDFKSNSAVAWSNKSDFACANAFNNSIIPEDTFFPSSDVPCDVKLVEKSFETDTNLNFQNLSVIGFRILLLKVAGFNLLMTLRLWSSRAKRSGSGVKQTLNFDLLKLAGDVESNPGPSRGHMAPPSEETPLIPQRSCSLLSTEAGALHVLLPARGPGPPQRLSFSFGDHLAEDLCVQAAKASGILPVYHSLFALATEDLSCWFPPSHIFSVEDASTQVLLYRIRFYFPNWFGLEKCHRFGLRKDLASAILDLPVLEHLFAQHRSDLVSGRLPVGLSLKEQGECLSLAVLDLARMAREQAQRPGELLKTVSYKACLPPSLRDLIQGLSFVTRRRIRRTVRRALRRVAACQADRHSLMAKYIMDLERLDPAGAAETFHVGLPGALGGHDGLGLLRVAGDGGIAWTQGEQEVLQPFCDFPEIVDISIKQAPRVGPAGEHRLVTVTRTDNQILEAEFPGLPEALSFVALVDGYFRLTTDSQHFFCKEVAPPRLLEEVAEQCHGPITLDFAINKLKTGGSRPGSYVLRRSPQDFDSFLLTVCVQNPLGPDYKGCLIRRSPTGTFLLVGLSRPHSSLRELLATCWDGGLHVDGVAVTLTSCCIPRPKEKSNLIVVQRGHSPPTSSLVQPQSQYQLSQITFHKIPADSLEWHENLGHGSFTKIYRGCRHEVVDGEARKTEVLLKVMDAKHKNCMESFLEAASLMSQVSYRHLVLLHGVCMAGDSTMVQEFVHLGAIDMYLRKRGHLVPASWKLQVVKQLAYALNYLEDKGLPHGNVSARKVLLAREGADGSPPFIKLSDPGVSPAVLSLEMLTDRIPWVAPECLREAQTLSLEADKWGFGATVWEVFSGVTMPISALDPAKKLQFYEDRQQLPAPKWTELALLIQQCMAYEPVQRPSFRAVIRDLNSLISSDYELLSDPTPGALAPRDGLWNGAQLYACQDPTIFEERHLKYISQLGKGNFGSVELCRYDPLGDNTGALVAVKQLQHSGPDQQRDFQREIQILKALHSDFIVKYRGVSYGPGRQSLRLVMEYLPSGCLRDFLQRHRARLDASRLLLYSSQICKGMEYLGSRRCVHRDLAARNILVESEAHVKIADFGLAKLLPLDKDYYVVREPGQSPIFWYAPESLSDNIFSRQSDVWSFGVVLYELFTYCDKSCSPSAEFLRMMGCERDVPALCRLLELLEEGQRLPAPPACPAEVHELMKLCWAPSPQDRPSFSALGPQLDMLWSGSRGCETHAFTAHPEGKHHSLSFS

SEQ ID NO: 1919 - protein, 1613 aa, Artificial Sequence
  Synthetic Polypeptide
MALPVTALLLPLALLLHAARPDIQMTQTTSSLSASLGDRVTISCRASQDISKYLNWYQQKPDGTVKLLIYHTSRLHSGVPSRFSGSGSGTDYSLTISNLEQEDIATYFCQQGNTLPYTFGGGTKLEITGGGGSGGGGSGGGGSEVKLQESGPGLVAPSQSLSVTCTVSGVSLPDYGVSWIRQPPRKGLEWLGVIWGSETTYYNSALKSRLTIIKDNSKSQVFLKMNSLQTDDTAIYYCAKHYYYGGSYAMDYWGQGTSVTVSSRVEQKLISEEDLAKPTTTPAPRPPTPAPTIASQPLSLRPEACRPAAGGAVHTRGLDFACDIYIWAPLAGTCGVLLLSLVITLYCGRARVKFSRSADAPAYQQGQNQLYNELNLGRREEYDVLDKRRGRDPEMGGKPRRKNPQEGLYNELQKDKMAEAYSEIGMKGERRRGKGHDGLYQGLSTATKDTYDALHMQALPPRSRGSGATNFSLLKQAGDVEENPGPGIHMAPPSEETPLIPQRSCSLLSTEAGALHVLLPARGPGPPQRLSFSFGDHLAEDLCVQAAKASGILPVYHSLFALATEDLSCWFPPSHIFSVEDASTQVLLYRIRFYFPNWFGLEKCHRFGLRKDLASAILDLPVLEHLFAQHRSDLVSGRLPVGLSLKEQGECLSLAVLDLARMAREQAQRPGELLKTVSYKACLPPSLRDLIQGLSFVTRRRIRRTVRRALRRVAACQADRHSLMAKYIMDLERLDPAGAAETFHVGLPGALGGHDGLGLLRVAGDGGIAWTQGEQEVLQPFCDFPEIVDISIKQAPRVGPAGEHRLVTVTRTDNQILEAEFPGLPEALSFVALVDGYFRLTTDSQHFFCKEVAPPRLLEEVAEQCHGPITLDFAINKLKTGGSRPGSYVLRRSPQDFDSFLLTVCVQNPLGPDYKGCLIRRSPTGTFLLVGLSRPHSSLRELLATCWDGGLHVDGVAVTLTSCCIPRPKEKSNLIVVQRGHSPPTSSLVQPQSQYQLSQITFHKIPADSLEWHENLGHGSFTKIYRGCRHEVVDGEARKTEVLLKVMDAKHKNCMESFLEAASLMSQVSYRHLVLLHGVCMAGDSTMVQEFVHLGAIDMYLRKRGHLVPASWKLQVVKQLAYALNYLEDKGLPHGNVSARKVLLAREGADGSPPFIKLSDPGVSPAVLSLEMLTDRIPWVAPECLREAQTLSLEADKWGFGATVWEVFSGVTMPISALDPAKKLQFYEDRQQLPAPKWTELALLIQQCMAYEPVQRPSFRAVIRDLNSLISSDYELLSDPTPGALAPRDGLWNGAQLYACQDPTIFEERHLKYISQLGKGNFGSVELCRYDPLGDNTGALVAVKQLQHSGPDQQRDFQREIQILKALHSDFIVKYRGVSYGPGRQSLRLVMEYLPSGCLRDFLQRHRARLDASRLLLYSSQICKGMEYLGSRRCVHRDLAARNILVESEAHVKIADFGLAKLLPLDKDYYVVREPGQSPIFWYAPESLSDNIFSRQSDVWSFGVVLYELFTYCDKSCSPSAEFLRMMGCERDVPALCRLLELLEEGQRLPAPPACPAEVHELMKLCWAPSPQDRPSFSALGPQLDMLWSGSRGCETHAFTAHPEGKHHSLSFS

SEQ ID NO: 1920 - protein, 1601 aa, Artificial Sequence
  Synthetic Polypeptide
MALPVTALLLPLALLLHAARPDIQMTQTTSSLSASLGDRVTISCRASQDISKYLNWYQQKPDGTVKLLIYHTSRLHSGVPSRFSGSGSGTDYSLTISNLEQEDIATYFCQQGNTLPYTFGGGTKLEITGGGGSGGGGSGGGGSEVKLQESGPGLVAPSQSLSVTCTVSGVSLPDYGVSWIRQPPRKGLEWLGVIWGSETTYYNSALKSRLTIIKDNSKSQVFLKMNSLQTDDTAIYYCAKHYYYGGSYAMDYWGQGTSVTVSSRVDGNEEMGGITQTPYKVSISGTTVILTCPQYPGSEILWQHNDKNIGGDEDDKNIGSDEDHLSLKEFSELEQSGYYVCYPRGSKPEDANFYLYLRARVCENCMEMDVMSVATIVIVDICITGGLLLLVYYWSKNRKAKAKPVTRGAGAGGRQRGQNKERPPPVPNPDYEPIRKGQRDLYSGLNQRRISRGSGATNFSLLKQAGDVEENPGPGIHMAPPSEETPLIPQRSCSLLSTEAGALHVLLPARGPGPPQRLSFSFGDHLAEDLCVQAAKASGILPVYHSLFALATEDLSCWFPPSHIFSVEDASTQVLLYRIRFYFPNWFGLEKCHRFGLRKDLASAILDLPVLEHLFAQHRSDLVSGRLPVGLSLKEQGECLSLAVLDLARMAREQAQRPGELLKTVSYKACLPPSLRDLIQGLSFVTRRRIRRTVRRALRRVAACQADRHSLMAKYIMDLERLDPAGAAETFHVGLPGALGGHDGLGLLRVAGDGGIAWTQGEQEVLQPFCDFPEIVDISIKQAPRVGPAGEHRLVTVTRTDNQILEAEFPGLPEALSFVALVDGYFRLTTDSQHFFCKEVAPPRLLEEVAEQCHGPITLDFAINKLKTGGSRPGSYVLRRSPQDFDSFLLTVCVQNPLGPDYKGCLIRRSPTGTFLLVGLSRPHSSLRELLATCWDGGLHVDGVAVTLTSCCIPRPKEKSNLIVVQRGHSPPTSSLVQPQSQYQLSQITFHKIPADSLEWHENLGHGSFTKIYRGCRHEVVDGEARKTEVLLKVMDAKHKNCMESFLEAASLMSQVSYRHLVLLHGVCMAGDSTMVQEFVHLGAIDMYLRKRGHLVPASWKLQVVKQLAYALNYLEDKGLPHGNVSARKVLLAREGADGSPPFIKLSDPGVSPAVLSLEMLTDRIPWVAPECLREAQTLSLEADKWGFGATVWEVFSGVTMPISALDPAKKLQFYEDRQQLPAPKWTELALLIQQCMAYEPVQRPSFRAVIRDLNSLISSDYELLSDPTPGALAPRDGLWNGAQLYACQDPTIFEERHLKYISQLGKGNFGSVELCRYDPLGDNTGALVAVKQLQHSGPDQQRDFQREIQILKALHSDFIVKYRGVSYGPGRQSLRLVMEYLPSGCLRDFLQRHRARLDASRLLLYSSQICKGMEYLGSRRCVHRDLAARNILVESEAHVKIADFGLAKLLPLDKDYYVVREPGQSPIFWYAPESLSDNIFSRQSDVWSFGVVLYELFTYCDKSCSPSAEFLRMMGCERDVPALCRLLELLEEGQRLPAPPACPAEVHELMKLCWAPSPQDRPSFSALGPQLDMLWSGSRGCETHAFTAHPEGKHHSLSFS

SEQ ID NO: 1921 - protein, 1566 aa, Artificial Sequence
  Synthetic Polypeptide
MALPVTALLLPLALLLHAARPDIQMTQTTSSLSASLGDRVTISCRASQDISKYLNWYQQKPDGTVKLLIYHTSRLHSGVPSRFSGSGSGTDYSLTISNLEQEDIATYFCQQGNTLPYTFGGGTKLEITGGGGSGGGGSGGGGSEVKLQESGPGLVAPSQSLSVTCTVSGVSLPDYGVSWIRQPPRKGLEWLGVIWGSETTYYNSALKSRLTIIKDNSKSQVFLKMNSLQTDDTAIYYCAKHYYYGGSYAMDYWGQGTSVTVSSRVFKIPIEELEDRVFVNCNTSITWVEGTVGTLLSDITRLDLGKRILDPRGIYRCNGTDIYKDKESTVQVHYRMCQSCVELDPATVAGIIVTDVIATLLLALGVFCFAGHETGRLSGAADTQALLRNDQVYQPLRDRDDAQYSHLGGNWARNKSRGSGATNFSLLKQAGDVEENPGPGIHMAPPSEETPLIPQRSCSLLSTEAGALHVLLPARGPGPPQRLSFSFGDHLAEDLCVQAAKASGILPVYHSLFALATEDLSCWFPPSHIFSVEDASTQVLLYRIRFYFPNWFGLEKCHRFGLRKDLASAILDLPVLEHLFAQHRSDLVSGRLPVGLSLKEQGECLSLAVLDLARMAREQAQRPGELLKTVSYKACLPPSLRDLIQGLSFVTRRRIRRTVRRALRRVAACQADRHSLMAKYIMDLERLDPAGAAETFHVGLPGALGGHDGLGLLRVAGDGGIAWTQGEQEVLQPFCDFPEIVDISIKQAPRVGPAGEHRLVTVTRTDNQILEAEFPGLPEALSFVALVDGYFRLTTDSQHFFCKEVAPPRLLEEVAEQCHGPITLDFAINKLKTGGSRPGSYVLRRSPQDFDSFLLTVCVQNPLGPDYKGCLIRRSPTGTFLLVGLSRPHSSLRELLATCWDGGLHVDGVAVTLTSCCIPRPKEKSNLIVVQRGHSPPTSSLVQPQSQYQLSQITFHKIPADSLEWHENLGHGSFTKIYRGCRHEVVDGEARKTEVLLKVMDAKHKNCMESFLEAASLMSQVSYRHLVLLHGVCMAGDSTMVQEFVHLGAIDMYLRKRGHLVPASWKLQVVKQLAYALNYLEDKGLPHGNVSARKVLLAREGADGSPPFIKLSDPGVSPAVLSLEMLTDRIPWVAPECLREAQTLSLEADKWGFGATVWEVFSGVTMPISALDPAKKLQFYEDRQQLPAPKWTELALLIQQCMAYEPVQRPSFRAVIRDLNSLISSDYELLSDPTPGALAPRDGLWNGAQLYACQDPTIFEERHLKYISQLGKGNFGSVELCRYDPLGDNTGALVAVKQLQHSGPDQQRDFQREIQILKALHSDFIVKYRGVSYGPGRQSLRLVMEYLPSGCLRDFLQRHRARLDASRLLLYSSQICKGMEYLGSRRCVHRDLAARNILVESEAHVKIADFGLAKLLPLDKDYYVVREPGQSPIFWYAPESLSDNIFSRQSDVWSFGVVLYELFTYCDKSCSPSAEFLRMMGCERDVPALCRLLELLEEGQRLPAPPACPAEVHELMKLCWAPSPQDRPSFSALGPQLDMLWSGSRGCETHAFTAHPEGKHHSLSFS

SEQ ID NO: 1922 - protein, 1576 aa, Artificial Sequence
  Synthetic Polypeptide
MALPVTALLLPLALLLHAARPDIQMTQTTSSLSASLGDRVTISCRASQDISKYLNWYQQKPDGTVKLLIYHTSRLHSGVPSRFSGSGSGTDYSLTISNLEQEDIATYFCQQGNTLPYTFGGGTKLEITGGGGSGGGGSGGGGSEVKLQESGPGLVAPSQSLSVTCTVSGVSLPDYGVSWIRQPPRKGLEWLGVIWGSETTYYNSALKSRLTIIKDNSKSQVFLKMNSLQTDDTAIYYCAKHYYYGGSYAMDYWGQGTSVTVSSRVQSIKGNHLVKVYDYQEDGSVLLTCDAEAKNITWFKDGKMIGFLTEDKKKWNLGSNAKDPRGMYQCKGSQNKSKPLQVYYRMCQNCIELNAATISGFLFAEIVSIFVLAVGVYFIAGQDGVRQSRASDKQTLLPNDQLYQPLKDREDDQYSHLQGNQLRRNSRGSGATNFSLLKQAGDVEENPGPGIHMAPPSEETPLIPQRSCSLLSTEAGALHVLLPARGPGPPQRLSFSFGDHLAEDLCVQAAKASGILPVYHSLFALATEDLSCWFPPSHIFSVEDASTQVLLYRIRFYFPNWFGLEKCHRFGLRKDLASAILDLPVLEHLFAQHRSDLVSGRLPVGLSLKEQGECLSLAVLDLARMAREQAQRPGELLKTVSYKACLPPSLRDLIQGLSFVTRRRIRRTVRRALRRVAACQADRHSLMAKYIMDLERLDPAGAAETFHVGLPGALGGHDGLGLLRVAGDGGIAWTQGEQEVLQPFCDFPEIVDISIKQAPRVGPAGEHRLVTVTRTDNQILEAEFPGLPEALSFVALVDGYFRLTTDSQHFFCKEVAPPRLLEEVAEQCHGPITLDFAINKLKTGGSRPGSYVLRRSPQDFDSFLLTVCVQNPLGPDYKGCLIRRSPTGTFLLVGLSRPHSSLRELLATCWDGGLHVDGVAVTLTSCCIPRPKEKSNLIVVQRGHSPPTSSLVQPQSQYQLSQITFHKIPADSLEWHENLGHGSFTKIYRGCRHEVVDGEARKTEVLLKVMDAKHKNCMESFLEAASLMSQVSYRHLVLLHGVCMAGDSTMVQEFVHLGAIDMYLRKRGHLVPASWKLQVVKQLAYALNYLEDKGLPHGNVSARKVLLAREGADGSPPFIKLSDPGVSPAVLSLEMLTDRIPWVAPECLREAQTLSLEADKWGFGATVWEVFSGVTMPISALDPAKKLQFYEDRQQLPAPKWTELALLIQQCMAYEPVQRPSFRAVIRDLNSLISSDYELLSDPTPGALAPRDGLWNGAQLYACQDPTIFEERHLKYISQLGKGNFGSVELCRYDPLGDNTGALVAVKQLQHSGPDQQRDFQREIQILKALHSDFIVKYRGVSYGPGRQSLRLVMEYLPSGCLRDFLQRHRARLDASRLLLYSSQICKGMEYLGSRRCVHRDLAARNILVESEAHVKIADFGLAKLLPLDKDYYVVREPGQSPIFWYAPESLSDNIFSRQSDVWSFGVVLYELFTYCDKSCSPSAEFLRMMGCERDVPALCRLLELLEEGQRLPAPPACPAEVHELMKLCWAPSPQDRPSFSALGPQLDMLWSGSRGCETHAFTAHPEGKHHSLSFS

SEQ ID NO: 1923 - protein, 1559 aa, Artificial Sequence
  Synthetic Polypeptide
MALPVTALLLPLALLLHAARPDIQMTQTTSSLSASLGDRVTISCRASQDISKYLNWYQQKPDGTVKLLIYHTSRLHSGVPSRFSGSGSGTDYSLTISNLEQEDIATYFCQQGNTLPYTFGGGTKLEITGGGGSGGGGSGGGGSEVKLQESGPGLVAPSQSLSVTCTVSGVSLPDYGVSWIRQPPRKGLEWLGVIWGSETTYYNSALKSRLTIIKDNSKSQVFLKMNSLQTDDTAIYYCAKHYYYGGSYAMDYWGQGTSVTVSSRVQSFGLLDPKLCYLLDGILFIYGVILTALFLRVKFSRSADAPAYQQGQNQLYNELNLGRREEYDVLDKRRGRDPEMGGKPQRRKNPQEGLYNELQKDKMAEAYSEIGMKGERRRGKGHDGLYQGLSTATKDTYDALHMQALPPRSRGSGATNFSLLKQAGDVEENPGPGIHMAPPSEETPLIPQRSCSLLSTEAGALHVLLPARGPGPPQRLSFSFGDHLAEDLCVQAAKASGILPVYHSLFALATEDLSCWFPPSHIFSVEDASTQVLLYRIRFYFPNWFGLEKCHRFGLRKDLASAILDLPVLEHLFAQHRSDLVSGRLPVGLSLKEQGECLSLAVLDLARMAREQAQRPGELLKTVSYKACLPPSLRDLIQGLSFVTRRRIRRTVRRALRRVAACQADRHSLMAKYIMDLERLDPAGAAETFHVGLPGALGGHDGLGLLRVAGDGGIAWTQGEQEVLQPFCDFPEIVDISIKQAPRVGPAGEHRLVTVTRTDNQILEAEFPGLPEALSFVALVDGYFRLTTDSQHFFCKEVAPPRLLEEVAEQCHGPITLDFAINKLKTGGSRPGSYVLRRSPQDFDSFLLTVCVQNPLGPDYKGCLIRRSPTGTFLLVGLSRPHSSLRELLATCWDGGLHVDGVAVTLTSCCIPRPKEKSNLIVVQRGHSPPTSSLVQPQSQYQLSQITFHKIPADSLEWHENLGHGSFTKIYRGCRHEVVDGEARKTEVLLKVMDAKHKNCMESFLEAASLMSQVSYRHLVLLHGVCMAGDSTMVQEFVHLGAIDMYLRKRGHLVPASWKLQVVKQLAYALNYLEDKGLPHGNVSARKVLLAREGADGSPPFIKLSDPGVSPAVLSLEMLTDRIPWVAPECLREAQTLSLEADKWGFGATVWEVFSGVTMPISALDPAKKLQFYEDRQQLPAPKWTELALLIQQCMAYEPVQRPSFRAVIRDLNSLISSDYELLSDPTPGALAPRDGLWNGAQLYACQDPTIFEERHLKYISQLGKGNFGSVELCRYDPLGDNTGALVAVKQLQHSGPDQQRDFQREIQILKALHSDFIVKYRGVSYGPGRQSLRLVMEYLPSGCLRDFLQRHRARLDASRLLLYSSQICKGMEYLGSRRCVHRDLAARNILVESEAHVKIADFGLAKLLPLDKDYYVVREPGQSPIFWYAPESLSDNIFSRQSDVWSFGVVLYELFTYCDKSCSPSAEFLRMMGCERDVPALCRLLELLEEGQRLPAPPACPAEVHELMKLCWAPSPQDRPSFSALGPQLDMLWSGSRGCETHAFTAHPEGKHHSLSFS

SEQ ID NO: 1924 - protein, 1781 aa, Artificial Sequence
  Synthetic Polypeptide
MALPVTALLLPLALLLHAARPDIQMTQTTSSLSASLGDRVTISCRASQDISKYLNWYQQKPDGTVKLLIYHTSRLHSGVPSRFSGSGSGTDYSLTISNLEQEDIATYFCQQGNTLPYTFGGGTKLEITLEGQPKANPTVTLFPPSSEELQANKATLVCLISDFYPGAVTVAWKADGSPVKAGVETTKPSKQSNNKYAASSYLSLTPEQWKSHRSYSCQVTHEGSTVEKTVAPTECSGRADCGITSASYHQGVLSATILYEILLGKATLYAVLVSALVLMAMVKRKDSRGRAKRSGSGATNFSLLKQAGDVEENPGPTSMDWIWRILFLVGAATGAHSFEVKLQESGPGLVAPSQSLSVTCTVSGVSLPDYGVSWIRQPPRKGLEWLGVIWGSETTYYNSALKSRLTIIKDNSKSQVFLKMNSLQTDDTAIYYCAKHYYYGGSYAMDYWGQGTSVTVSSTRASTKGPSVFPLAPSSKSTSGGTAALGCLVKDYFPEPVTVSWNSGALTSGVHTFPAVLQSSGLYSLSSVVTVPSSSLGTQTYICNVNHKPSNTKVDKRVEPKSCIPEDTFFPSSDVPCDVKLVEKSFETDTNLNFQNLSVIGFRILLLKVAGFNLLMTLRLWSSRAKRSGSGVKQTLNFDLLKLAGDVESNPGPSRGHMAPPSEETPLIPQRSCSLLSTEAGALHVLLPARGPGPPQRLSFSFGDHLAEDLCVQAAKASGILPVYHSLFALATEDLSCWFPPSHIFSVEDASTQVLLYRIRFYFPNWFGLEKCHRFGLRKDLASAILDLPVLEHLFAQHRSDLVSGRLPVGLSLKEQGECLSLAVLDLARMAREQAQRPGELLKTVSYKACLPPSLRDLIQGLSFVTRRRIRRTVRRALRRVAACQADRHSLMAKYIMDLERLDPAGAAETFHVGLPGALGGHDGLGLLRVAGDGGIAWTQGEQEVLQPFCDFPEIVDISIKQAPRVGPAGEHRLVTVTRTDNQILEAEFPGLPEALSFVALVDGYFRLTTDSQHFFCKEVAPPRLLEEVAEQCHGPITLDFAINKLKTGGSRPGSYVLRRSPQDFDSFLLTVCVQNPLGPDYKGCLIRRSPTGTFLLVGLSRPHSSLRELLATCWDGGLHVDGVAVTLTSCCIPRPKEKSNLIVVQRGHSPPTSSLVQPQSQYQLSQITFHKIPADSLEWHENLGHGSFTKIYRGCRHEVVDGEARKTEVLLKVMDAKHKNCMESFLEAASLMSQVSYRHLVLLHGVCMAGDSTMVQEFVHLGAIDMYLRKRGHLVPASWKLQVVKQLAYALNYLEDKGLPHGNVSARKVLLAREGADGSPPFIKLSDPGVSPAVLSLEMLTDRIPWVAPECLREAQTLSLEADKWGFGATVWEVFSGVTMPISALDPAKKLQFYEDRQQLPAPKWTELALLIQQCMAYEPVQRPSFRAVIRDLNSLISSDYELLSDPTPGALAPRDGLWNGAQLYACQDPTIFEERHLKYISQLGKGNFGSVELCRYDPLGDNTGALVAVKQLQHSGPDQQRDFQREIQILKALHSDFIVKYRGVSYGPGRQSLRLVMEYLPSGCLRDFLQRHRARLDASRLLLYSSQICKGMEYLGSRRCVHRDLAARNILVESEAHVKIADFGLAKLLPLDKDYYVVREPGQSPIFWYAPESLSDNIFSRQSDVWSFGVVLYELFTYCDKSCSPSAEFLRMMGCERDVPALCRLLELLEEGQRLPAPPACPAEVHELMKLCWAPSPQDRPSFSALGPQLDMLWSGSRGCETHAFTAHPEGKHHSLSFS

SEQ ID NO: 1925 - protein, 1803 aa, Artificial Sequence
  Synthetic Polypeptide
MALPVTALLLPLALLLHAARPDIQMTQTTSSLSASLGDRVTISCRASQDISKYLNWYQQKPDGTVKLLIYHTSRLHSGVPSRFSGSGSGTDYSLTISNLEQEDIATYFCQQGNTLPYTFGGGTKLEITLEGQPKANPTVTLFPPSSEELQANKATLVCLISDFYPGAVTVAWKADGSPVKAGVETTKPSKQSNNKYAASSYLSLTPEQWKSHRSYSCQVTHEGSTVEKTVAPTECSPIKTDVITMDPKDNCSKDANDTLLLQLTNTSAYYMYLLLLLKSVVYFAIITCCLLRRTAFCCNGEKSRAKRSGSGATNFSLLKQAGDVEENPGPTSMDWIWRILFLVGAATGAHSFEVKLQESGPGLVAPSQSLSVTCTVSGVSLPDYGVSWIRQPPRKGLEWLGVIWGSETTYYNSALKSRLTIIKDNSKSQVFLKMNSLQTDDTAIYYCAKHYYYGGSYAMDYWGQGTSVTVSSTRASTKGPSVFPLAPSSKSTSGGTAALGCLVKDYFPEPVTVSWNSGALTSGVHTFPAVLQSSGLYSLSSVVTVPSSSLGTQTYICNVNHKPSNTKVDKRVEPKSCEVKTDSTDHVKPKETENTKQPSKSCHKPKAIVHTEKVNMMSLTVLGLRMLFAKTVAVNFLLTAKLFFLRAKRSGSGVKQTLNFDLLKLAGDVESNPGPSRGHMAPPSEETPLIPQRSCSLLSTEAGALHVLLPARGPGPPQRLSFSFGDHLAEDLCVQAAKASGILPVYHSLFALATEDLSCWFPPSHIFSVEDASTQVLLYRIRFYFPNWFGLEKCHRFGLRKDLASAILDLPVLEHLFAQHRSDLVSGRLPVGLSLKEQGECLSLAVLDLARMAREQAQRPGELLKTVSYKACLPPSLRDLIQGLSFVTRRRIRRTVRRALRRVAACQADRHSLMAKYIMDLERLDPAGAAETFHVGLPGALGGHDGLGLLRVAGDGGIAWTQGEQEVLQPFCDFPEIVDISIKQAPRVGPAGEHRLVTVTRTDNQILEAEFPGLPEALSFVALVDGYFRLTTDSQHFFCKEVAPPRLLEEVAEQCHGPITLDFAINKLKTGGSRPGSYVLRRSPQDFDSFLLTVCVQNPLGPDYKGCLIRRSPTGTFLLVGLSRPHSSLRELLATCWDGGLHVDGVAVTLTSCCIPRPKEKSNLIVVQRGHSPPTSSLVQPQSQYQLSQITFHKIPADSLEWHENLGHGSFTKIYRGCRHEVVDGEARKTEVLLKVMDAKHKNCMESFLEAASLMSQVSYRHLVLLHGVCMAGDSTMVQEFVHLGAIDMYLRKRGHLVPASWKLQVVKQLAYALNYLEDKGLPHGNVSARKVLLAREGADGSPPFIKLSDPGVSPAVLSLEMLTDRIPWVAPECLREAQTLSLEADKWGFGATVWEVFSGVTMPISALDPAKKLQFYEDRQQLPAPKWTELALLIQQCMAYEPVQRPSFRAVIRDLNSLISSDYELLSDPTPGALAPRDGLWNGAQLYACQDPTIFEERHLKYISQLGKGNFGSVELCRYDPLGDNTGALVAVKQLQHSGPDQQRDFQREIQILKALHSDFIVKYRGVSYGPGRQSLRLVMEYLPSGCLRDFLQRHRARLDASRLLLYSSQICKGMEYLGSRRCVHRDLAARNILVESEAHVKIADFGLAKLLPLDKDYYVVREPGQSPIFWYAPESLSDNIFSRQSDVWSFGVVLYELFTYCDKSCSPSAEFLRMMGCERDVPALCRLLELLEEGQRLPAPPACPAEVHELMKLCWAPSPQDRPSFSALGPQLDMLWSGSRGCETHAFTAHPEGKHHSLSFS

SEQ ID NO: 1926 - protein, 1773 aa, Artificial Sequence
  Synthetic Polypeptide
MLLLLVPVLEVIFTLGGTRAQSVTQLGSHVSVSEGALVLLRCNYSSSVPPYLFWYVQYPNQGLQLLLKHTTGATLVKGINGFEAEFKKSETSFHLTKPSAHMSDAAEYFCAVSDSRAAGNKLTFGGGTRVLVKPNIQNPDPAVYQLRDSKSSDKSVCLFTDFDSQTNVSQSKDSDVYITDKTVLDMRSMDFKSNSAVAWSNKSDFACANAFNNSIIPEDTFFPSPESSCDVKLVEKSFETDTNLNFQNLSVIGFRILLLKVAGFNLLMTLRLWSSRAKRSGSGATNFSLLKQAGDVEENPGPTSMGIRLLCRVAFCFLAVGLVDVKVTQSSRYLVKRTGEKVFLECVQDMDHENMFWYRQDPGLGLRLIYFSYDVKMKEKGDIPEGYSVSREKKERFSLILESASTNQTSMYLCASRFPGTAYNSPLHFGNGTRLTVTEDLNKVFPPEVAVFEPSEAEISHTQKATLVCLATGFFPDHVELSWWVNGKEVHSGVSTDPQPLKEQPALNDSRYCLSSRLRVSATFWQNPRNHFRCQVQFYGLSENDEWTQDRAKPVTQIVSAEAWGRADCGFTSVSYQQGVLSATILYEILLGKATLYAVLVSALVLMAMVKRKDFRAKRSGSGVKQTLNFDLLKLAGDVESNPGPSRGHMAPPSEETPLIPQRSCSLLSTEAGALHVLLPARGPGPPQRLSFSFGDHLAEDLCVQAAKASGILPVYHSLFALATEDLSCWFPPSHIFSVEDASTQVLLYRIRFYFPNWFGLEKCHRFGLRKDLASAILDLPVLEHLFAQHRSDLVSGRLPVGLSLKEQGECLSLAVLDLARMAREQAQRPGELLKTVSYKACLPPSLRDLIQGLSFVTRRRIRRTVRRALRRVAACQADRHSLMAKYIMDLERLDPAGAAETFHVGLPGALGGHDGLGLLRVAGDGGIAWTQGEQEVLQPFCDFPEIVDISIKQAPRVGPAGEHRLVTVTRTDNQILEAEFPGLPEALSFVALVDGYFRLTTDSQHFFCKEVAPPRLLEEVAEQCHGPITLDFAINKLKTGGSRPGSYVLRRSPQDFDSFLLTVCVQNPLGPDYKGCLIRRSPTGTFLLVGLSRPHSSLRELLATCWDGGLHVDGVAVTLTSCCIPRPKEKSNLIVVQRGHSPPTSSLVQPQSQYQLSQITFHKIPADSLEWHENLGHGSFTKIYRGCRHEVVDGEARKTEVLLKVMDAKHKNCMESFLEAASLMSQVSYRHLVLLHGVCMAGDSTMVQEFVHLGAIDMYLRKRGHLVPASWKLQVVKQLAYALNYLEDKGLPHGNVSARKVLLAREGADGSPPFIKLSDPGVSPAVLSLEMLTDRIPWVAPECLREAQTLSLEADKWGFGATVWEVFSGVTMPISALDPAKKLQFYEDRQQLPAPKWTELALLIQQCMAYEPVQRPSFRAVIRDLNSLISSDYELLSDPTPGALAPRDGLWNGAQLYACQDPTIFEERHLKYISQLGKGNFGSVELCRYDPLGDNTGALVAVKQLQHSGPDQQRDFQREIQILKALHSDFIVKYRGVSYGPGRQSLRLVMEYLPSGCLRDFLQRHRARLDASRLLLYSSQICKGMEYLGSRRCVHRDLAARNILVESEAHVKIADFGLAKLLPLDKDYYVVREPGQSPIFWYAPESLSDNIFSRQSDVWSFGVVLYELFTYCDKSCSPSAEFLRMMGCERDVPALCRLLELLEEGQRLPAPPACPAEVHELMKLCWAPSPQDRPSFSALGPQLDMLWSGSRGCETHAFTAHPEGKHHSLSFS

SEQ ID NO: 1927 - protein, 11 aa, Artificial Sequence
  Synthetic Polypeptide
GGGGGGGGGGG

SEQ ID NO: 1928 - protein, 11 aa, Artificial Sequence
  Synthetic Polypeptide
GGGGGGGGGGG

SEQ ID NO: 1929 - protein, 11 aa, Artificial Sequence
  Synthetic Polypeptide
GGGGGGGGGGG

SEQ ID NO: 1930 - protein, 11 aa, Artificial Sequence
  Synthetic Polypeptide
GGGGGGGGGGG

SEQ ID NO: 1931 - protein, 11 aa, Artificial Sequence
  Synthetic Polypeptide
GGGGGGGGGGG

SEQ ID NO: 1932 - protein, 11 aa, Artificial Sequence
  Synthetic Polypeptide
GGGGGGGGGGG

SEQ ID NO: 1933 - protein, 11 aa, Artificial Sequence
  Synthetic Polypeptide
GGGGGGGGGGG

SEQ ID NO: 1934 - protein, 11 aa, Artificial Sequence
  Synthetic Polypeptide
GGGGGGGGGGG

SEQ ID NO: 1935 - protein, 11 aa, Artificial Sequence
  Synthetic Polypeptide
GGGGGGGGGGG

SEQ ID NO: 1936 - RNA, 20 nt, Artificial Sequence
  Synthetic Polynucleotide
cuugacggacaguaccgcag

SEQ ID NO: 1937 - RNA, 20 nt, Artificial Sequence
  Synthetic Polynucleotide
agagagggagcacugugaca

SEQ ID NO: 1938 - RNA, 20 nt, Artificial Sequence
  Synthetic Polynucleotide
acuccaguuacuaugaugac

SEQ ID NO: 1939 - RNA, 20 nt, Artificial Sequence
  Synthetic Polynucleotide
agauaccguguacuacaagu

SEQ ID NO: 1940 - RNA, 20 nt, Artificial Sequence
  Synthetic Polynucleotide
auguuggggguacauucagg

SEQ ID NO: 1941 - RNA, 20 nt, Artificial Sequence
  Synthetic Polynucleotide
uuaucagaaggaaauuuccg

SEQ ID NO: 1942 - RNA, 20 nt, Artificial Sequence
  Synthetic Polynucleotide
uuaugaugggaaaguacacg

SEQ ID NO: 1943 - RNA, 20 nt, Artificial Sequence
  Synthetic Polynucleotide
cuucugugagcucauugcgc

SEQ ID NO: 1944 - RNA, 20 nt, Artificial Sequence
  Synthetic Polynucleotide
gguggaaauucccgccaacg

SEQ ID NO: 1945 - RNA, 20 nt, Artificial Sequence
  Synthetic Polynucleotide
uucgggguagaccuccauag

SEQ ID NO: 1946 - RNA, 20 nt, Artificial Sequence
  Synthetic Polynucleotide
ccuucgaagcgaaaguacug

SEQ ID NO: 1947 - RNA, 20 nt, Artificial Sequence
  Synthetic Polynucleotide
ccccuauccuaguccuacgg

SEQ ID NO: 1948 - RNA, 20 nt, Artificial Sequence
  Synthetic Polynucleotide
auucagacauuaggccaucg

SEQ ID NO: 1949 - RNA, 20 nt, Artificial Sequence
  Synthetic Polynucleotide
cuguugccaauacacaauca

SEQ ID NO: 1950 - RNA, 20 nt, Artificial Sequence
  Synthetic Polynucleotide
gcacacggucuaguucucag

SEQ ID NO: 1951 - RNA, 20 nt, Artificial Sequence
  Synthetic Polynucleotide
cccaugcgacgaccucccca

SEQ ID NO: 1952 - RNA, 20 nt, Artificial Sequence
  Synthetic Polynucleotide
aagaugcgcauggcucgaug

SEQ ID NO: 1953 - RNA, 20 nt, Artificial Sequence
  Synthetic Polynucleotide
cgauucguagaucuucaggu

SEQ ID NO: 1954 - RNA, 20 nt, Artificial Sequence
  Synthetic Polynucleotide
ggggcccagcuauccaaccc

SEQ ID NO: 1955 - RNA, 20 nt, Artificial Sequence
  Synthetic Polynucleotide
ggagccacaucugcuaggcg

SEQ ID NO: 1956 - RNA, 20 nt, Artificial Sequence
  Synthetic Polynucleotide
ugggacacagacucuacagg

SEQ ID NO: 1957 - RNA, 20 nt, Artificial Sequence
  Synthetic Polynucleotide
gauauugcugugucuuacac

SEQ ID NO: 1958 - RNA, 20 nt, Artificial Sequence
  Synthetic Polynucleotide
caggagucaggacuuagaug

SEQ ID NO: 1959 - RNA, 20 nt, Artificial Sequence
  Synthetic Polynucleotide
aggaggugauuauccacuug

SEQ ID NO: 1960 - RNA, 20 nt, Artificial Sequence
  Synthetic Polynucleotide
gggcccauaaucgagcccag

SEQ ID NO: 1961 - RNA, 20 nt, Artificial Sequence
  Synthetic Polynucleotide
agguaaagcuggcuuucgag

SEQ ID NO: 1962 - RNA, 20 nt, Artificial Sequence
  Synthetic Polynucleotide
gcauacauagaagaucacag

SEQ ID NO: 1963 - RNA, 20 nt, Artificial Sequence
  Synthetic Polynucleotide
agagcuguuugacaaagugg

SEQ ID NO: 1964 - RNA, 20 nt, Artificial Sequence
  Synthetic Polynucleotide
ccaccccaucaagagaucgg

SEQ ID NO: 1965 - RNA, 20 nt, Artificial Sequence
  Synthetic Polynucleotide
uccugccagcuaacacucag

SEQ ID NO: 1966 - RNA, 20 nt, Artificial Sequence
  Synthetic Polynucleotide
guuagugcugacuccgguaa

SEQ ID NO: 1967 - RNA, 20 nt, Artificial Sequence
  Synthetic Polynucleotide
acaaaguucaugcaacacgg

SEQ ID NO: 1968 - RNA, 20 nt, Artificial Sequence
  Synthetic Polynucleotide
uggagaaagacguaacuucg

SEQ ID NO: 1969 - RNA, 20 nt, Artificial Sequence
  Synthetic Polynucleotide
ucugcccugagguaugcgau

SEQ ID NO: 1970 - RNA, 20 nt, Artificial Sequence
  Synthetic Polynucleotide
gauuccgcuuggugaaaacg

SEQ ID NO: 1971 - RNA, 20 nt, Artificial Sequence
  Synthetic Polynucleotide
guuccaaaaacccucacacc

SEQ ID NO: 1972 - RNA, 20 nt, Artificial Sequence
  Synthetic Polynucleotide
gugacuccaagaagccacug

SEQ ID NO: 1973 - RNA, 20 nt, Artificial Sequence
  Synthetic Polynucleotide
ccucuacaaugggugcaccg

SEQ ID NO: 1974 - RNA, 20 nt, Artificial Sequence
  Synthetic Polynucleotide
cucagggccaguguaccaug

SEQ ID NO: 1975 - RNA, 20 nt, Artificial Sequence
  Synthetic Polynucleotide
aaugcccugacuaccucgag

SEQ ID NO: 1976 - RNA, 20 nt, Artificial Sequence
  Synthetic Polynucleotide
gaccuaccugaauaacacac

SEQ ID NO: 1977 - RNA, 20 nt, Artificial Sequence
  Synthetic Polynucleotide
ccaaggcuauucagugugcg

SEQ ID NO: 1978 - RNA, 20 nt, Artificial Sequence
  Synthetic Polynucleotide
ucaucaccaaguucgcaugu

SEQ ID NO: 1979 - RNA, 20 nt, Artificial Sequence
  Synthetic Polynucleotide
ucuaccccaacagcgacaug

SEQ ID NO: 1980 - RNA, 20 nt, Artificial Sequence
  Synthetic Polynucleotide
acuugaucgagaaaccccgg

SEQ ID NO: 1981 - RNA, 20 nt, Artificial Sequence
  Synthetic Polynucleotide
cuaaccguuagagcuuccga

SEQ ID NO: 1982 - RNA, 20 nt, Artificial Sequence
  Synthetic Polynucleotide
cuacgacagucacuucgaug

SEQ ID NO: 1983 - RNA, 20 nt, Artificial Sequence
  Synthetic Polynucleotide
aauucccagagaucuaggcg

SEQ ID NO: 1984 - RNA, 20 nt, Artificial Sequence
  Synthetic Polynucleotide
gaaguggaagcugagaacga

SEQ ID NO: 1985 - RNA, 20 nt, Artificial Sequence
  Synthetic Polynucleotide
agaaaaugaacacuugcuug

SEQ ID NO: 1986 - RNA, 20 nt, Artificial Sequence
  Synthetic Polynucleotide
ccuucauacaguucccguug

SEQ ID NO: 1987 - RNA, 20 nt, Artificial Sequence
  Synthetic Polynucleotide
ggccaucaguacuuccugag

SEQ ID NO: 1988 - RNA, 20 nt, Artificial Sequence
  Synthetic Polynucleotide
cccacgugcugaauaacgga

SEQ ID NO: 1989 - RNA, 20 nt, Artificial Sequence
  Synthetic Polynucleotide
gcugccacaagcacucuagg

SEQ ID NO: 1990 - RNA, 20 nt, Artificial Sequence
  Synthetic Polynucleotide
aaagagaaucgccaacucag

SEQ ID NO: 1991 - RNA, 20 nt, Artificial Sequence
  Synthetic Polynucleotide
acaaacucuggacggccggu

SEQ ID NO: 1992 - RNA, 20 nt, Artificial Sequence
  Synthetic Polynucleotide
gaaucagugcguauacagcg

SEQ ID NO: 1993 - RNA, 20 nt, Artificial Sequence
  Synthetic Polynucleotide
uuucacguaucaaaccaccc

SEQ ID NO: 1994 - RNA, 20 nt, Artificial Sequence
  Synthetic Polynucleotide
aucugacguacacuuuccag

SEQ ID NO: 1995 - RNA, 20 nt, Artificial Sequence
  Synthetic Polynucleotide
ggucaaaugaagcgcaacag

SEQ ID NO: 1996 - RNA, 20 nt, Artificial Sequence
  Synthetic Polynucleotide
cuuuaucaugcaaugcacag

SEQ ID NO: 1997 - RNA, 20 nt, Artificial Sequence
  Synthetic Polynucleotide
aaaacugcacauaacuccga

SEQ ID NO: 1998 - RNA, 20 nt, Artificial Sequence
  Synthetic Polynucleotide
ggcagcgcaccauaagugca

SEQ ID NO: 1999 - RNA, 20 nt, Artificial Sequence
  Synthetic Polynucleotide
uuguaagucaaauagagaca

SEQ ID NO: 2000 - RNA, 20 nt, Artificial Sequence
  Synthetic Polynucleotide
ccaacuaucuaacuccacuc

SEQ ID NO: 2001 - RNA, 20 nt, Artificial Sequence
  Synthetic Polynucleotide
cugguaagucucaccuuccg

SEQ ID NO: 2002 - RNA, 20 nt, Artificial Sequence
  Synthetic Polynucleotide
ucuuuguaugaacagcuggg

SEQ ID NO: 2003 - RNA, 20 nt, Artificial Sequence
  Synthetic Polynucleotide
caauugucagaaguauucug

SEQ ID NO: 2004 - RNA, 20 nt, Artificial Sequence
  Synthetic Polynucleotide
uaaucuucaucaaucaauag

SEQ ID NO: 2005 - RNA, 20 nt, Artificial Sequence
  Synthetic Polynucleotide
uuaguuaguugauacuacug

SEQ ID NO: 2006 - RNA, 20 nt, Artificial Sequence
  Synthetic Polynucleotide
caguaaaagaaaaucacggu

SEQ ID NO: 2007 - RNA, 20 nt, Artificial Sequence
  Synthetic Polynucleotide
aaaaggaucaagacgcucug

SEQ ID NO: 2008 - RNA, 20 nt, Artificial Sequence
  Synthetic Polynucleotide
ugaacaaacgcuggucaccg

SEQ ID NO: 2009 - RNA, 20 nt, Artificial Sequence
  Synthetic Polynucleotide
agauauugaccaugagacag

SEQ ID NO: 2010 - RNA, 20 nt, Artificial Sequence
  Synthetic Polynucleotide
ggucaccgacgacccgaccc

SEQ ID NO: 2011 - RNA, 20 nt, Artificial Sequence
  Synthetic Polynucleotide
ggagaccaucgagaccacag

SEQ ID NO: 2012 - RNA, 20 nt, Artificial Sequence
  Synthetic Polynucleotide
gccgacuuacgauuuccgag

SEQ ID NO: 2013 - RNA, 20 nt, Artificial Sequence
  Synthetic Polynucleotide
ccugccucaccucacacucg

SEQ ID NO: 2014 - RNA, 20 nt, Artificial Sequence
  Synthetic Polynucleotide
aagucgacauacucucggcu

SEQ ID NO: 2015 - RNA, 20 nt, Artificial Sequence
  Synthetic Polynucleotide
ggagucuguguuaucuggaa

SEQ ID NO: 2016 - RNA, 20 nt, Artificial Sequence
  Synthetic Polynucleotide
cugaucguaggaccacggug

SEQ ID NO: 2017 - RNA, 20 nt, Artificial Sequence
  Synthetic Polynucleotide
cacuucgaccgacaaaccug

SEQ ID NO: 2018 - RNA, 20 nt, Artificial Sequence
  Synthetic Polynucleotide
uagaugaucagaccaagccc

SEQ ID NO: 2019 - RNA, 20 nt, Artificial Sequence
  Synthetic Polynucleotide
ggcaguggagugguucaggg

SEQ ID NO: 2020 - RNA, 20 nt, Artificial Sequence
  Synthetic Polynucleotide
ggggagcgagugauguacgu

SEQ ID NO: 2021 - RNA, 20 nt, Artificial Sequence
  Synthetic Polynucleotide
ggacgcguucaaguaagcgu

SEQ ID NO: 2022 - RNA, 20 nt, Artificial Sequence
  Synthetic Polynucleotide
uuuggacagaucuauuccag

SEQ ID NO: 2023 - RNA, 20 nt, Artificial Sequence
  Synthetic Polynucleotide
aggaugcggauaugacucug

SEQ ID NO: 2024 - RNA, 20 nt, Artificial Sequence
  Synthetic Polynucleotide
gauguaucaaccuagugcug

SEQ ID NO: 2025 - RNA, 20 nt, Artificial Sequence
  Synthetic Polynucleotide
uacaacagaucguguaauga

SEQ ID NO: 2026 - RNA, 20 nt, Artificial Sequence
  Synthetic Polynucleotide
ccuccuccaagcaucaguaa

SEQ ID NO: 2027 - RNA, 20 nt, Artificial Sequence
  Synthetic Polynucleotide
ucaaagaguccaucaaacac

SEQ ID NO: 2028 - RNA, 20 nt, Artificial Sequence
  Synthetic Polynucleotide
caagaggugaccaucccccg

SEQ ID NO: 2029 - RNA, 20 nt, Artificial Sequence
  Synthetic Polynucleotide
cuccaggugguuguucacca

SEQ ID NO: 2030 - RNA, 20 nt, Artificial Sequence
  Synthetic Polynucleotide
cggacagguacaacugccga

SEQ ID NO: 2031 - RNA, 20 nt, Artificial Sequence
  Synthetic Polynucleotide
cucuccguccacacucucag

SEQ ID NO: 2032 - RNA, 20 nt, Artificial Sequence
  Synthetic Polynucleotide
gggcguacgaguuugacaag

SEQ ID NO: 2033 - RNA, 20 nt, Artificial Sequence
  Synthetic Polynucleotide
gcagcagacagacgaguacg

SEQ ID NO: 2034 - RNA, 20 nt, Artificial Sequence
  Synthetic Polynucleotide
cuagguaugaaguagcuccg

SEQ ID NO: 2035 - RNA, 20 nt, Artificial Sequence
  Synthetic Polynucleotide
ugaacaccaucaugcagcug

SEQ ID NO: 2036 - RNA, 20 nt, Artificial Sequence
  Synthetic Polynucleotide
cuuagcccacugaugaacga

SEQ ID NO: 2037 - RNA, 20 nt, Artificial Sequence
  Synthetic Polynucleotide
ccgcaaaugacuggucacgc

SEQ ID NO: 2038 - RNA, 20 nt, Artificial Sequence
  Synthetic Polynucleotide
auugccccccuccaaacacg

SEQ ID NO: 2039 - RNA, 20 nt, Artificial Sequence
  Synthetic Polynucleotide
caggacgguacuuacgucug

SEQ ID NO: 2040 - RNA, 20 nt, Artificial Sequence
  Synthetic Polynucleotide
gaguagcagcucacauaacu

SEQ ID NO: 2041 - RNA, 20 nt, Artificial Sequence
  Synthetic Polynucleotide
caggacaaguacuccaaaag

SEQ ID NO: 2042 - RNA, 20 nt, Artificial Sequence
  Synthetic Polynucleotide
acuccgucagcucguuagaa

SEQ ID NO: 2043 - RNA, 20 nt, Artificial Sequence
  Synthetic Polynucleotide
ccugggaaucaucaaggagu

SEQ ID NO: 2044 - RNA, 20 nt, Artificial Sequence
  Synthetic Polynucleotide
cuucaaguuugucgucgucg

SEQ ID NO: 2045 - RNA, 20 nt, Artificial Sequence
  Synthetic Polynucleotide
ggguccgugcugucccaugg

SEQ ID NO: 2046 - RNA, 20 nt, Artificial Sequence
  Synthetic Polynucleotide
acacacucgaugucacucca

SEQ ID NO: 2047 - RNA, 20 nt, Artificial Sequence
  Synthetic Polynucleotide
agccuguaaccggugcacag

SEQ ID NO: 2048 - RNA, 20 nt, Artificial Sequence
  Synthetic Polynucleotide
agguggacacaaucccucug

SEQ ID NO: 2049 - RNA, 20 nt, Artificial Sequence
  Synthetic Polynucleotide
ugugccggaagugccgcaca

SEQ ID NO: 2050 - RNA, 20 nt, Artificial Sequence
  Synthetic Polynucleotide
agauacucacgaucucauug

SEQ ID NO: 2051 - RNA, 20 nt, Artificial Sequence
  Synthetic Polynucleotide
ugcagccguagucuugauug

SEQ ID NO: 2052 - RNA, 42 nt, Artificial Sequence
  Synthetic Polynucleotide
  misc_feature (1)..(20): n is a, c, g, or u
nnnnnnnnnnnnnnnnnnnnguuuuagagcuaugcuguuuug

SEQ ID NO: 2053 - RNA, 79 nt, Artificial Sequence
  Synthetic Polynucleotide
aacuuaccaaggaacagcauagcaaguuaaaauaaggcuaguccguuaucaacuugaaaaaguggcaccgagucggugc

SEQ ID NO: 2054 - RNA, 67 nt, Artificial Sequence
  Synthetic Polynucleotide
aacagcauagcaaguuaaaauaaggcuaguccguuaucaacuugaaaaaguggcaccgagucggugc

SEQ ID NO: 2055 - RNA, 95 nt, Artificial Sequence
  Synthetic Polynucleotide
  misc_feature (1)..(19): n is a, c, g, or u
nnnnnnnnnnnnnnnnnnnguuuuagagcuagaaauagcaaguuaaaauaaggcuaguccguuaucaacuugaaaaaguggcaccgagucggugc

SEQ ID NO: 2056 - RNA, 18 nt, Artificial Sequence
  Synthetic Polynucleotide
  misc_feature (1)..(18): n is a, c, g, or u
nnnnnnnnnnnnnnnnnn

SEQ ID NO: 2057 - RNA, 18 nt, Artificial Sequence
  Synthetic Polynucleotide
  misc_feature (1)..(18): n is a, c, g, or u
nnnnnnnnnnnnnnnnnn

SEQ ID NO: 2058 - RNA, 18 nt, Artificial Sequence
  Synthetic Polynucleotide
  misc_feature (1)..(18): n is a, c, g, or u
nnnnnnnnnnnnnnnnnn

SEQ ID NO: 2059 - RNA, 18 nt, Artificial Sequence
  Synthetic Polynucleotide
  misc_feature (1)..(18): n is a, c, g, or u
nnnnnnnnnnnnnnnnnn

SEQ ID NO: 2060 - DNA, 23 bp, Artificial Sequence
  Synthetic Polynucleotide
gaagatcacgatcagcacgcagg

SEQ ID NO: 2061 - DNA, 23 bp, Artificial Sequence
  Synthetic Polynucleotide
gtcagactctgacaggatcatgg

SEQ ID NO: 2062 - DNA, 23 bp, Artificial Sequence
  Synthetic Polynucleotide
gattgccagagactaatgtctgg

SEQ ID NO: 2063 - DNA, 23 bp, Artificial Sequence
  Synthetic Polynucleotide
gctatgatggaggtccagggggg

SEQ ID NO: 2064 - DNA, 23 bp, Artificial Sequence
  Synthetic Polynucleotide
ctttaccaacgagctgaagcagg

SEQ ID NO: 2065 - DNA, 23 bp, Artificial Sequence
  Synthetic Polynucleotide
ggctatgatggaggtccaggggg

SEQ ID NO: 2066 - DNA, 23 bp, Artificial Sequence
  Synthetic Polynucleotide
tggctatgatggaggtccagggg

SEQ ID NO: 2067 - DNA, 23 bp, Artificial Sequence
  Synthetic Polynucleotide
gctgcccagacattagtctctgg

SEQ ID NO: 2068 - DNA, 23 bp, Artificial Sequence
  Synthetic Polynucleotide
catggctatgatggaggtccagg

SEQ ID NO: 2069 - DNA, 23 bp, Artificial Sequence
  Synthetic Polynucleotide
atggctatgatggaggtccaggg

SEQ ID NO: 2070 - DNA, 23 bp, Artificial Sequence
  Synthetic Polynucleotide
tcagcacgcaggtctgtcccagg

SEQ ID NO: 2071 - DNA, 23 bp, Artificial Sequence
  Synthetic Polynucleotide
attgccagagactaatgtctggg

SEQ ID NO: 2072 - DNA, 23 bp, Artificial Sequence
  Synthetic Polynucleotide
caggatcatggctatgatggagg

SEQ ID NO: 2073 - DNA, 23 bp, Artificial Sequence
  Synthetic Polynucleotide
cagcaaggtagacttcaagatgg

SEQ ID NO: 2074 - DNA, 23 bp, Artificial Sequence
  Synthetic Polynucleotide
tgacaggatcatggctatgatgg

SEQ ID NO: 2075 - DNA, 23 bp, Artificial Sequence
  Synthetic Polynucleotide
taatgtctgggcagcagacaggg

SEQ ID NO: 2076 - DNA, 23 bp, Artificial Sequence
  Synthetic Polynucleotide
gcaaactgcaaatagcataaagg

SEQ ID NO: 2077 - DNA, 23 bp, Artificial Sequence
  Synthetic Polynucleotide
ctaatgtctgggcagcagacagg

SEQ ID NO: 2078 - DNA, 23 bp, Artificial Sequence
  Synthetic Polynucleotide
acgcaggtctgtcccaggctggg

SEQ ID NO: 2079 - DNA, 23 bp, Artificial Sequence
  Synthetic Polynucleotide
gctcctgcagtctctctgtgtgg

SEQ ID NO: 2080 - DNA, 23 bp, Artificial Sequence
  Synthetic Polynucleotide
gtccaggggggacccagcctggg

SEQ ID NO: 2081 - DNA, 23 bp, Artificial Sequence
  Synthetic Polynucleotide
gtcccaggctgggtcccccctgg

SEQ ID NO: 2082 - DNA, 23 bp, Artificial Sequence
  Synthetic Polynucleotide
ggtccaggggggacccagcctgg

SEQ ID NO: 2083 - DNA, 23 bp, Artificial Sequence
  Synthetic Polynucleotide
actgacctgcttcagctcgttgg

SEQ ID NO: 2084 - DNA, 23 bp, Artificial Sequence
  Synthetic Polynucleotide
cagccacacagagagactgcagg

SEQ ID NO: 2085 - DNA, 23 bp, Artificial Sequence
  Synthetic Polynucleotide
cacgcaggtctgtcccaggctgg

SEQ ID NO: 2086 - DNA, 23 bp, Artificial Sequence
  Synthetic Polynucleotide
gaagatcacgatcagcacgcagg

SEQ ID NO: 2087 - DNA, 23 bp, Artificial Sequence
  Synthetic Polynucleotide
tgggccgcaaaataaactcctgg

SEQ ID NO: 2088 - DNA, 23 bp, Artificial Sequence
  Synthetic Polynucleotide
cgtcagctcgttagaaaggtagg

SEQ ID NO: 2089 - DNA, 23 bp, Artificial Sequence
  Synthetic Polynucleotide
actccgtcagctcgttagaaagg

SEQ ID NO: 2090 - DNA, 23 bp, Artificial Sequence
  Synthetic Polynucleotide
gggccgcaaaataaactcctggg

SEQ ID NO: 2091 - DNA, 23 bp, Artificial Sequence
  Synthetic Polynucleotide
gtcagactctgacaggatcatgg

SEQ ID NO: 2092 - DNA, 23 bp, Artificial Sequence
  Synthetic Polynucleotide
attcccaggagtttattttgcgg

SEQ ID NO: 2093 - DNA, 23 bp, Artificial Sequence
  Synthetic Polynucleotide
gctatgatggaggtccagggggg

SEQ ID NO: 2094 - DNA, 23 bp, Artificial Sequence
  Synthetic Polynucleotide
gcccctgctggcaagtcaagtgg

SEQ ID NO: 2095 - DNA, 23 bp, Artificial Sequence
  Synthetic Polynucleotide
ttgccacttgacttgccagcagg

SEQ ID NO: 2096 - DNA, 23 bp, Artificial Sequence
  Synthetic Polynucleotide
ctacctttctaacgagctgacgg

SEQ ID NO: 2097 - DNA, 23 bp, Artificial Sequence
  Synthetic Polynucleotide
tcatactctcttcgtcattgggg

SEQ ID NO: 2098 - DNA, 23 bp, Artificial Sequence
  Synthetic Polynucleotide
ctttaccaacgagctgaagcagg

SEQ ID NO: 2099 - DNA, 23 bp, Artificial Sequence
  Synthetic Polynucleotide
caggacaagtactccaaaagtgg

SEQ ID NO: 2100 - DNA, 23 bp, Artificial Sequence
  Synthetic Polynucleotide
gccacttgacttgccagcagggg

SEQ ID NO: 2101 - DNA, 23 bp, Artificial Sequence
  Synthetic Polynucleotide
ggctatgatggaggtccaggggg

SEQ ID NO: 2102 - DNA, 23 bp, Artificial Sequence
  Synthetic Polynucleotide
tggctatgatggaggtccagggg

SEQ ID NO: 2103 - DNA, 23 bp, Artificial Sequence
  Synthetic Polynucleotide
catggctatgatggaggtccagg

SEQ ID NO: 2104 - DNA, 23 bp, Artificial Sequence
  Synthetic Polynucleotide
gtcctgcatctgggttgagatgg

SEQ ID NO: 2105 - DNA, 23 bp, Artificial Sequence
  Synthetic Polynucleotide
ttccatctcaacccagatgcagg

SEQ ID NO: 2106 - DNA, 23 bp, Artificial Sequence
  Synthetic Polynucleotide
atggctatgatggaggtccaggg

SEQ ID NO: 2107 - DNA, 23 bp, Artificial Sequence
  Synthetic Polynucleotide
tgccacttgacttgccagcaggg

SEQ ID NO: 2108 - DNA, 23 bp, Artificial Sequence
  Synthetic Polynucleotide
gttcatactctcttcgtcattgg

SEQ ID NO: 2109 - DNA, 23 bp, Artificial Sequence
  Synthetic Polynucleotide
tcagcacgcaggtctgtcccagg

SEQ ID NO: 2110 - DNA, 18 bp, Artificial Sequence
  Synthetic Polynucleotide
  misc_feature (1)..(18): n is a, c, g, or t
nnnnnnnnnnnnnnnnnn

SEQ ID NO: 2111 - DNA, 23 bp, Artificial Sequence
  Synthetic Polynucleotide
gcggggaggattgaaccacgagg

SEQ ID NO: 2112 - DNA, 23 bp, Artificial Sequence
  Synthetic Polynucleotide
tcgtggttcaatcctccccgcgg

SEQ ID NO: 2113 - DNA, 23 bp, Artificial Sequence
  Synthetic Polynucleotide
gaggattgaaccacgaggcgggg

SEQ ID NO: 2114 - DNA, 23 bp, Artificial Sequence
  Synthetic Polynucleotide
tcttgtggacccggagccgaggg

SEQ ID NO: 2115 - DNA, 23 bp, Artificial Sequence
  Synthetic Polynucleotide
aatcccgggagcgcagcgagtgg

SEQ ID NO: 2116 - DNA, 23 bp, Artificial Sequence
  Synthetic Polynucleotide
aatgggtcaacaaaactggacgg

SEQ ID NO: 2117 - DNA, 23 bp, Artificial Sequence
  Synthetic Polynucleotide
aaagtgtggggctcttccgcggg

SEQ ID NO: 2118 - DNA, 23 bp, Artificial Sequence
  Synthetic Polynucleotide
gctgagctaggtacgacctgtgg

SEQ ID NO: 2119 - DNA, 23 bp, Artificial Sequence
  Synthetic Polynucleotide
caaagtgtggggctcttccgcgg

SEQ ID NO: 2120 - DNA, 23 bp, Artificial Sequence
  Synthetic Polynucleotide
ggaggattgaaccacgaggcggg

SEQ ID NO: 2121 - DNA, 23 bp, Artificial Sequence
  Synthetic Polynucleotide
atcccgggagcgcagcgagtggg

SEQ ID NO: 2122 - DNA, 23 bp, Artificial Sequence
  Synthetic Polynucleotide
ctgattgtctgttgttgcatcgg

SEQ ID NO: 2123 - DNA, 23 bp, Artificial Sequence
  Synthetic Polynucleotide
ctggcagtgactccgaatcccgg

SEQ ID NO: 2124 - DNA, 23 bp, Artificial Sequence
  Synthetic Polynucleotide
cttcaagtttgtcgtcgtcgggg

SEQ ID NO: 2125 - DNA, 23 bp, Artificial Sequence
  Synthetic Polynucleotide
gaagattcaggacctcttggtgg

SEQ ID NO: 2126 - DNA, 23 bp, Artificial Sequence
  Synthetic Polynucleotide
cgtgctgtcccatggaggtaggg

SEQ ID NO: 2127 - DNA, 23 bp, Artificial Sequence
  Synthetic Polynucleotide
tggcgcttgggtctcctacgagg

SEQ ID NO: 2128 - DNA, 23 bp, Artificial Sequence
  Synthetic Polynucleotide
cccgacgacgacaaacttgaagg

SEQ ID NO: 2129 - DNA, 23 bp, Artificial Sequence
  Synthetic Polynucleotide
acttgaaggtcttgtggacccgg

SEQ ID NO: 2130 - DNA, 23 bp, Artificial Sequence
  Synthetic Polynucleotide
tgagctaggtacgacctgtgggg

SEQ ID NO: 2131 - DNA, 23 bp, Artificial Sequence
  Synthetic Polynucleotide
tctcagcagaattgtcattccgg

SEQ ID NO: 2132 - DNA, 23 bp, Artificial Sequence
  Synthetic Polynucleotide
ctcgctgcgctcccgggattcgg

SEQ ID NO: 2133 - DNA, 23 bp, Artificial Sequence
  Synthetic Polynucleotide
tgtcccactcgctgcgctcccgg

SEQ ID NO: 2134 - DNA, 23 bp, Artificial Sequence
  Synthetic Polynucleotide
agtgcaaaccaggaactttccgg

SEQ ID NO: 2135 - DNA, 23 bp, Artificial Sequence
  Synthetic Polynucleotide
aacatcctggagcctgtaaccgg

SEQ ID NO: 2136 - DNA, 23 bp, Artificial Sequence
  Synthetic Polynucleotide
aggattgaaccacgaggcggggg

SEQ ID NO: 2137 - DNA, 23 bp, Artificial Sequence
  Synthetic Polynucleotide
gggaggattgaaccacgaggcgg

SEQ ID NO: 2138 - DNA, 23 bp, Artificial Sequence
  Synthetic Polynucleotide
cagtcttagaatgtacctggtgg

SEQ ID NO: 2139 - DNA, 23 bp, Artificial Sequence
  Synthetic Polynucleotide
agcacagccaccaacagcaacgg

SEQ ID NO: 2140 - DNA, 23 bp, Artificial Sequence
  Synthetic Polynucleotide
gtcttgtggacccggagccgagg

SEQ ID NO: 2141 - DNA, 23 bp, Artificial Sequence
  Synthetic Polynucleotide
ccacaacctagaagagaagacgg

SEQ ID NO: 2142 - DNA, 23 bp, Artificial Sequence
  Synthetic Polynucleotide
gggtccgtgctgtcccatggagg

SEQ ID NO: 2143 - DNA, 23 bp, Artificial Sequence
  Synthetic Polynucleotide
aggtcaaggattgtacgccctgg

SEQ ID NO: 2144 - DNA, 23 bp, Artificial Sequence
  Synthetic Polynucleotide
attgcatacaaggcatcccctgg

SEQ ID NO: 2145 - DNA, 23 bp, Artificial Sequence
  Synthetic Polynucleotide
aagcgccagaaacacaccttagg

SEQ ID NO: 2146 - DNA, 23 bp, Artificial Sequence
  Synthetic Polynucleotide
gaggcaagcaaacaaattgttgg

SEQ ID NO: 2147 - DNA, 23 bp, Artificial Sequence
  Synthetic Polynucleotide
tggaggtagggagcgctcctcgg

SEQ ID NO: 2148 - DNA, 23 bp, Artificial Sequence
  Synthetic Polynucleotide
acaattctgctgagatgtgccgg

SEQ ID NO: 2149 - DNA, 23 bp, Artificial Sequence
  Synthetic Polynucleotide
tggcagtgactccgaatcccggg

SEQ ID NO: 2150 - DNA, 23 bp, Artificial Sequence
  Synthetic Polynucleotide
ctgagctaggtacgacctgtggg

SEQ ID NO: 2151 - DNA, 23 bp, Artificial Sequence
  Synthetic Polynucleotide
accttcaagtttgtcgtcgtcgg

SEQ ID NO: 2152 - DNA, 23 bp, Artificial Sequence
  Synthetic Polynucleotide
gcttcttggattgacctggcagg

SEQ ID NO: 2153 - DNA, 23 bp, Artificial Sequence
  Synthetic Polynucleotide
taaggtgtgtttctggcgcttgg

SEQ ID NO: 2154 - DNA, 23 bp, Artificial Sequence
  Synthetic Polynucleotide
gtgcaccggttacaggctccagg

SEQ ID NO: 2155 - DNA, 23 bp, Artificial Sequence
  Synthetic Polynucleotide
aaggtgtgtttctggcgcttggg

SEQ ID NO: 2156 - DNA, 23 bp, Artificial Sequence
  Synthetic Polynucleotide
gacagcacggacccagtgcccgg

SEQ ID NO: 2157 - DNA, 23 bp, Artificial Sequence
  Synthetic Polynucleotide
gcacctagatgtactctagctgg

SEQ ID NO: 2158 - DNA, 23 bp, Artificial Sequence
  Synthetic Polynucleotide
gtcccactcgctgcgctcccggg

SEQ ID NO: 2159 - DNA, 23 bp, Artificial Sequence
  Synthetic Polynucleotide
gcaaatggaaagccaggagccgg

SEQ ID NO: 2160 - DNA, 23 bp, Artificial Sequence
  Synthetic Polynucleotide
cactttgctgggtgtggccgcgg

SEQ ID NO: 2161 - DNA, 18 bp, Artificial Sequence
  Synthetic Polynucleotide
  misc_feature (1)..(18): n is a, c, g, or t
nnnnnnnnnnnnnnnnnn

SEQ ID NO: 2162 - DNA, 23 bp, Artificial Sequence
  Synthetic Polynucleotide
acaacggggacagaacgccccgg

SEQ ID NO: 2163 - DNA, 23 bp, Artificial Sequence
  Synthetic Polynucleotide
actcaccaacagcaggaccgcgg

SEQ ID NO: 2164 - DNA, 23 bp, Artificial Sequence
  Synthetic Polynucleotide
ccttttccgggcccccgaagcgg

SEQ ID NO: 2165 - DNA, 23 bp, Artificial Sequence
  Synthetic Polynucleotide
cgcggcgacaacgagcacaaggg

SEQ ID NO: 2166 - DNA, 23 bp, Artificial Sequence
  Synthetic Polynucleotide
ggacaccatatctcagaagacgg

SEQ ID NO: 2167 - DNA, 23 bp, Artificial Sequence
  Synthetic Polynucleotide
ctgtccccgttgttccatggcgg

SEQ ID NO: 2168 - DNA, 23 bp, Artificial Sequence
  Synthetic Polynucleotide
aggcccaacttcctcatgagcgg

SEQ ID NO: 2169 - DNA, 23 bp, Artificial Sequence
  Synthetic Polynucleotide
ccgcggcgacaacgagcacaagg

SEQ ID NO: 2170 - DNA, 23 bp, Artificial Sequence
  Synthetic Polynucleotide
tccctaccgccatggaacaacgg

SEQ ID NO: 2171 - DNA, 23 bp, Artificial Sequence
  Synthetic Polynucleotide
ccccgttgttccatggcggtagg

SEQ ID NO: 2172 - DNA, 23 bp, Artificial Sequence
  Synthetic Polynucleotide
tgcagccgtagtcttgattgtgg

SEQ ID NO: 2173 - DNA, 23 bp, Artificial Sequence
  Synthetic Polynucleotide
gtggacagaggcatctcgcccgg

SEQ ID NO: 2174 - DNA, 23 bp, Artificial Sequence
  Synthetic Polynucleotide
caacgagcacaagggtcttgggg

SEQ ID NO: 2175 - DNA, 23 bp, Artificial Sequence
  Synthetic Polynucleotide
atagtcctgtccatatttgcagg

SEQ ID NO: 2176 - DNA, 23 bp, Artificial Sequence
  Synthetic Polynucleotide
tctcaggagaatcttcttcccgg

SEQ ID NO: 2177 - DNA, 23 bp, Artificial Sequence
  Synthetic Polynucleotide
cccgttgttccatggcggtaggg

SEQ ID NO: 2178 - DNA, 23 bp, Artificial Sequence
  Synthetic Polynucleotide
gcacaagggtcttggggacccgg

SEQ ID NO: 2179 - DNA, 23 bp, Artificial Sequence
  Synthetic Polynucleotide
acagaacgccccggccgcttcgg

SEQ ID NO: 2180 - DNA, 23 bp, Artificial Sequence
  Synthetic Polynucleotide
gacaacgagcacaagggtcttgg

SEQ ID NO: 2181 - DNA, 23 bp, Artificial Sequence
  Synthetic Polynucleotide
acaacgagcacaagggtcttggg

SEQ ID NO: 2182 - DNA, 23 bp, Artificial Sequence
  Synthetic Polynucleotide
taaagtgggtcaacaaaaccggg

SEQ ID NO: 2183 - DNA, 23 bp, Artificial Sequence
  Synthetic Polynucleotide
gcagatgctctgactccccgggg

SEQ ID NO: 2184 - DNA, 23 bp, Artificial Sequence
  Synthetic Polynucleotide
tgtcaacatgttgtcccccgggg

SEQ ID NO: 2185 - DNA, 23 bp, Artificial Sequence
  Synthetic Polynucleotide
cacagccacaatcaagactacgg

SEQ ID NO: 2186 - DNA, 23 bp, Artificial Sequence
  Synthetic Polynucleotide
gtacacgatgctgataaagtggg

SEQ ID NO: 2187 - DNA, 23 bp, Artificial Sequence
  Synthetic Polynucleotide
ggtgtcaacatgttgtcccccgg

SEQ ID NO: 2188 - DNA, 23 bp, Artificial Sequence
  Synthetic Polynucleotide
tcctgaagagaatcacacttagg

SEQ ID NO: 2189 - DNA, 23 bp, Artificial Sequence
  Synthetic Polynucleotide
gttctgtccccgttgttccatgg

SEQ ID NO: 2190 - DNA, 23 bp, Artificial Sequence
  Synthetic Polynucleotide
gacaggactatagcactcactgg

SEQ ID NO: 2191 - DNA, 23 bp, Artificial Sequence
  Synthetic Polynucleotide
tgtcgccgcggtcctgctgttgg

SEQ ID NO: 2192 - DNA, 23 bp, Artificial Sequence
  Synthetic Polynucleotide
ctctaccgtcttctgagatatgg

SEQ ID NO: 2193 - DNA, 23 bp, Artificial Sequence
  Synthetic Polynucleotide
cggcacttccggcacatctcagg

SEQ ID NO: 2194 - DNA, 23 bp, Artificial Sequence
  Synthetic Polynucleotide
gtgcgaagaaggcaccttccggg

SEQ ID NO: 2195 - DNA, 23 bp, Artificial Sequence
  Synthetic Polynucleotide
gtcctgggccgtgccttttccgg

SEQ ID NO: 2196 - DNA, 23 bp, Artificial Sequence
  Synthetic Polynucleotide
gaacgccccggccgcttcggggg

SEQ ID NO: 2197 - DNA, 23 bp, Artificial Sequence
  Synthetic Polynucleotide
ttccgggcccccgaagcggccgg

SEQ ID NO: 2198 - DNA, 23 bp, Artificial Sequence
  Synthetic Polynucleotide
agaacgccccggccgcttcgggg

SEQ ID NO: 2199 - DNA, 23 bp, Artificial Sequence
  Synthetic Polynucleotide
ataaagtgggtcaacaaaaccgg

SEQ ID NO: 2200 - DNA, 23 bp, Artificial Sequence
  Synthetic Polynucleotide
tgattcaggtacagaacatatgg

SEQ ID NO: 2201 - DNA, 23 bp, Artificial Sequence
  Synthetic Polynucleotide
cagaacgccccggccgcttcggg

SEQ ID NO: 2202 - DNA, 23 bp, Artificial Sequence
  Synthetic Polynucleotide
tcgggggcccggaaaaggcacgg

SEQ ID NO: 2203 - DNA, 23 bp, Artificial Sequence
  Synthetic Polynucleotide
gagcggccccacaacaaaagagg

SEQ ID NO: 2204 - DNA, 23 bp, Artificial Sequence
  Synthetic Polynucleotide
tgtgccggaagtgccgcacaggg

SEQ ID NO: 2205 - DNA, 23 bp, Artificial Sequence
  Synthetic Polynucleotide
atgtgccggaagtgccgcacagg

SEQ ID NO: 2206 - DNA, 23 bp, Artificial Sequence
  Synthetic Polynucleotide
agtgcgaagaaggcaccttccgg

SEQ ID NO: 2207 - DNA, 23 bp, Artificial Sequence
  Synthetic Polynucleotide
tcctgggccgtgccttttccggg

SEQ ID NO: 2208 - DNA, 23 bp, Artificial Sequence
  Synthetic Polynucleotide
ctcaccctgtgcggcacttccgg

SEQ ID NO: 2209 - DNA, 23 bp, Artificial Sequence
  Synthetic Polynucleotide
gataaaggtggctaaagctgagg

SEQ ID NO: 2210 - DNA, 23 bp, Artificial Sequence
  Synthetic Polynucleotide
ctgttggtgagtccccgccgcgg

SEQ ID NO: 2211 - DNA, 23 bp, Artificial Sequence
  Synthetic Polynucleotide
gcacagggtgagacaggagccgg

SEQ ID NO: 2212 - DNA, 18 bp, Artificial Sequence
  Synthetic Polynucleotide
  misc_feature (1)..(18): n is a, c, g, or t
nnnnnnnnnnnnnnnnnn

SEQ ID NO: 2213 - DNA, 21 bp, Artificial Sequence
  Synthetic Polynucleotide
gtaacaaatgagcacttgata

SEQ ID NO: 2214 - DNA, 21 bp, Artificial Sequence
  Synthetic Polynucleotide
cctcaaagtgactattcagtt

SEQ ID NO: 2215 - DNA, 21 bp, Artificial Sequence
  Synthetic Polynucleotide
ccatttctacagttcaagaaa

SEQ ID NO: 2216 - DNA, 21 bp, Artificial Sequence
  Synthetic Polynucleotide
cgacaaacaaatggtccaata

SEQ ID NO: 2217 - DNA, 21 bp, Artificial Sequence
  Synthetic Polynucleotide
gcacacagcaatgggaacata

SEQ ID NO: 2218 - DNA, 21 bp, Artificial Sequence
  Synthetic Polynucleotide
acaatgctcacaacgagattc

SEQ ID NO: 2219 - DNA, 21 bp, Artificial Sequence
  Synthetic Polynucleotide
tcttaggtgttaggagttaat

SEQ ID NO: 2220 - DNA, 21 bp, Artificial Sequence
  Synthetic Polynucleotide
atcaggcaatggacataatat

SEQ ID NO: 2221 - DNA, 21 bp, Artificial Sequence
  Synthetic Polynucleotide
gcagtctcatttgcacccata

SEQ ID NO: 2222 - DNA, 21 bp, Artificial Sequence
  Synthetic Polynucleotide
ccacaaagaatcaggtacaaa

SEQ ID NO: 2223 - DNA, 21 bp, Artificial Sequence
  Synthetic Polynucleotide
ctcactggaatgacctccttt

SEQ ID NO: 2224 - DNA, 21 bp, Artificial Sequence
  Synthetic Polynucleotide
gcagaagattgaggaccactt

SEQ ID NO: 2225 - DNA, 10 bp, Artificial Sequence
  Synthetic Polynucleotide
  misc_feature (1)..(10): n is a, c, g, or t
nnnnnnnnnn

SEQ ID NO: 2226 - DNA, 53 bp, Artificial Sequence
  Synthetic Polynucleotide
gtaacaaatgagcacttgatactcgagtatcaagtgctcatttgttacttttt

SEQ ID NO: 2227 - DNA, 53 bp, Artificial Sequence
  Synthetic Polynucleotide
cctcaaagtgactattcagttctcgagaactgaatagtcactttgaggttttt

SEQ ID NO: 2228 - DNA, 53 bp, Artificial Sequence
  Synthetic Polynucleotide
ccatttctacagttcaagaaactcgagtttcttgaactgtagaaatggttttt

SEQ ID NO: 2229 - DNA, 53 bp, Artificial Sequence
  Synthetic Polynucleotide
cgacaaacaaatggtccaatactcgagtattggaccatttgtttgtcgttttt

SEQ ID NO: 2230 - DNA, 53 bp, Artificial Sequence
  Synthetic Polynucleotide
gcacacagcaatgggaacatactcgagtatgttcccattgctgtgtgcttttt

SEQ ID NO: 2231 - DNA, 53 bp, Artificial Sequence
  Synthetic Polynucleotide
acaatgctcacaacgagattcctcgaggaatctcgttgtgagcattgtttttt

SEQ ID NO: 2232 - DNA, 53 bp, Artificial Sequence
  Synthetic Polynucleotide
tcttaggtgttaggagttaatctcgagattaactcctaacacctaagattttt

SEQ ID NO: 2233 - DNA, 53 bp, Artificial Sequence
  Synthetic Polynucleotide
atcaggcaatggacataatatctcgagatattatgtccattgcctgatttttt

SEQ ID NO: 2234 - DNA, 53 bp, Artificial Sequence
  Synthetic Polynucleotide
gcagtctcatttgcacccatactcgagtatgggtgcaaatgagactgcttttt

SEQ ID NO: 2235 - DNA, 53 bp, Artificial Sequence
  Synthetic Polynucleotide
ccacaaagaatcaggtacaaactcgagtttgtacctgattctttgtggttttt

SEQ ID NO: 2236 - DNA, 53 bp, Artificial Sequence
  Synthetic Polynucleotide
ctcactggaatgacctcctttctcgagaaaggaggtcattccagtgagttttt

SEQ ID NO: 2237 - DNA, 53 bp, Artificial Sequence
  Synthetic Polynucleotide
gcagaagattgaggaccacttctcgagaagtggtcctcaatcttctgcttttt

SEQ ID NO: 2238 - DNA, 18 bp, Artificial Sequence
  Synthetic Polynucleotide
  misc_feature (1)..(18): n is a, c, g, or t
nnnnnnnnnnnnnnnnnn

SEQ ID NO: 2239 - DNA, 18 bp, Artificial Sequence
  Synthetic Polynucleotide
  misc_feature (1)..(18): n is a, c, g, or t
nnnnnnnnnnnnnnnnnn

SEQ ID NO: 2240 - DNA, 18 bp, Artificial Sequence
  Synthetic Polynucleotide
  misc_feature (1)..(18): n is a, c, g, or t
nnnnnnnnnnnnnnnnnn

SEQ ID NO: 2241 - DNA, 18 bp, Artificial Sequence
  Synthetic Polynucleotide
  misc_feature (1)..(18): n is a, c, g, or t
nnnnnnnnnnnnnnnnnn

SEQ ID NO: 2242 - DNA, 18 bp, Artificial Sequence
  Synthetic Polynucleotide
  misc_feature (1)..(18): n is a, c, g, or t
nnnnnnnnnnnnnnnnnn

SEQ ID NO: 2243 - DNA, 18 bp, Artificial Sequence
  Synthetic Polynucleotide
  misc_feature (1)..(18): n is a, c, g, or t
nnnnnnnnnnnnnnnnnn

SEQ ID NO: 2244 - DNA, 18 bp, Artificial Sequence
  Synthetic Polynucleotide
  misc_feature (1)..(18): n is a, c, g, or t
nnnnnnnnnnnnnnnnnn

SEQ ID NO: 2245 - DNA, 18 bp, Artificial Sequence
  Synthetic Polynucleotide
  misc_feature (1)..(18): n is a, c, g, or t
nnnnnnnnnnnnnnnnnn

SEQ ID NO: 2246 - DNA, 18 bp, Artificial Sequence
  Synthetic Polynucleotide
  misc_feature (1)..(18): n is a, c, g, or t
nnnnnnnnnnnnnnnnnn

SEQ ID NO: 2247 - DNA, 18 bp, Artificial Sequence
  Synthetic Polynucleotide
  misc_feature (1)..(18): n is a, c, g, or t
nnnnnnnnnnnnnnnnnn

SEQ ID NO: 2248 - DNA, 18 bp, Artificial Sequence
  Synthetic Polynucleotide
  misc_feature (1)..(18): n is a, c, g, or t
nnnnnnnnnnnnnnnnnn

SEQ ID NO: 2249 - DNA, 18 bp, Artificial Sequence
  Synthetic Polynucleotide
  misc_feature (1)..(18): n is a, c, g, or t
nnnnnnnnnnnnnnnnnn

SEQ ID NO: 2250 - DNA, 780 bp, Homo sapiens
atggcccggatccccaagaccctaaagttcgtcgtcgtcatcgtcgcggtcctgctgccagtcctagcttactctgccaccactgcccggcaggaggaagttccccagcagacagtggccccacagcaacagaggcacagcttcaagggggaggagtgtccagcaggatctcatagatcagaacatactggagcctgtaacccgtgcacagagggtgtggattacaccaacgcttccaacaatgaaccttcttgcttcccatgtacagtttgtaaatcagatcaaaaacataaaagttcctgcaccatgaccagagacacagtgtgtcagtgtaaagaaggcaccttccggaatgaaaactccccagagatgtgccggaagtgtagcaggtgccctagtggggaagtccaagtcagtaattgtacgtcctgggatgatatccagtgtgttgaagaatttggtgccaatgccactgtggaaaccccagctgctgaagagacaatgaacaccagcccggggactcctgccccagctgctgaagagacaatgaacaccagcccagggactcctgccccagctgctgaagagacaatgaccaccagcccggggactcctgccccagctgctgaagagacaatgaccaccagcccggggactcctgccccagctgctgaagagacaatgaccaccagcccggggactcctgcctcttctcattacctctcatgcaccatcgtagggatcatagttctaattgtgcttctgattgtgtttgtttga

SEQ ID NO: 2251 - DNA, 1161 bp, Homo sapiens
atgggactttggggacaaagcgtcccgaccgcctcgagcgctcgagcagggcgctatccaggagccaggacagcgtcgggaaccagaccatggctcctggaccccaagatccttaagttcgtcgtcttcatcgtcgcggttctgctgccggtccgggttgactctgccaccatcccccggcaggacgaagttccccagcagacagtggccccacagcaacagaggcgcagcctcaaggaggaggagtgtccagcaggatctcatagatcagaatatactggagcctgtaacccgtgcacagagggtgtggattacaccattgcttccaacaatttgccttcttgcctgctatgtacagtttgtaaatcaggtcaaacaaataaaagttcctgtaccacgaccagagacaccgtgtgtcagtgtgaaaaaggaagcttccaggataaaaactcccctgagatgtgccggacgtgtagaacagggtgtcccagagggatggtcaaggtcagtaattgtacgccccggagtgacatcaagtgcaaaaatgaatcagctgccagttccactgggaaaaccccagcagcggaggagacagtgaccaccatcctggggatgcttgcctctccctatcactaccttatcatcatagtggttttagtcatcattttagctgtggttgtggttggcttttcatgtcggaagaaattcatttcttacctcaaaggcatctgctcaggtggtggaggaggtcccgaacgtgtgcacagagtccttttccggcggcgttcatgtccttcacgagttcctggggcggaggacaatgcccgcaacgagaccctgagtaacagatacttgcagcccacccaggtctctgagcaggaaatccaaggtcaggagctggcagagctaacaggtgtgactgtagagttgccagaggagccacagcgtctgctggaacaggcagaagctgaagggtgtcagaggaggaggctgctggttccagtgaatgacgctgactccgctgacatcagcaccttgctggatgcctcggcaacactggaagaaggacatgcaaaggaaacaattcaggaccaactggtgggctccgaaaagctcttttatgaagaagatgaggcaggctctgctacgtcctgcctgtga

SEQ ID NO: 2252 - DNA, 1323 bp, Homo sapiens
atggaacaacggggacagaacgccccggccgcttcgggggcccggaaaaggcacggcccaggacccagggaggcgcggggagccaggcctgggccccgggtccccaagacccttgtgctcgttgtcgccgcggtcctgctgttggtctcagctgagtctgctctgatcacccaacaagacctagctccccagcagagagcggccccacaacaaaagaggtccagcccctcagagggattgtgtccacctggacaccatatctcagaagacggtagagattgcatctcctgcaaatatggacaggactatagcactcactggaatgacctccttttctgcttgcgctgcaccaggtgtgattcaggtgaagtggagctaagtccctgcaccacgaccagaaacacagtgtgtcagtgcgaagaaggcaccttccgggaagaagattctcctgagatgtgccggaagtgccgcacagggtgtcccagagggatggtcaaggtcggtgattgtacaccctggagtgacatcgaatgtgtccacaaagaatcaggtacaaagcacagtggggaagtcccagctgtggaggagacggtgacctccagcccagggactcctgcctctccctgttctctctcaggcatcatcataggagtcacagttgcagccgtagtcttgattgtggctgtgtttgtttgcaagtctttactgtggaagaaagtccttccttacctgaaaggcatctgctcaggtggtggtggggaccctgagcgtgtggacagaagctcacaacgacctggggctgaggacaatgtcctcaatgagatcgtgagtatcttgcagcccacccaggtccctgagcaggaaatggaagtccaggagccagcagagccaacaggtgtcaacatgttgtcccccggggagtcagagcatctgctggaaccggcagaagctgaaaggtctcagaggaggaggctgctggttccagcaaatgaaggtgatcccactgagactctgagacagtgcttcgatgactttgcagacttggtgccctttgactcctgggagccgctcatgaggaagttgggcctcatggacaatgagataaaggtggctaaagctgaggcagcgggccacagggacaccttgtacacgatgctgataaagtgggtcaacaaaaccgggcgagatgcctctgtccacaccctgctggatgccttggagacgctgggagagagacttgccaagcagaagattgaggaccacttgttgagctctggaaagttcatgtatctagaaggtaatgcagactctgccatgtcctaa

SEQ ID NO: 2253 - DNA, 1230 bp, Homo sapiens
atgggacagcacggacccagtgcccgggcccgggcagggcgcgccccaggacccaggccggcgcgggaagccagccctcggctccgggtccacaagaccttcaagtttgtcgtcgtcggggtcctgctgcaggtcgtacctagctcagctgcaaccatcaaacttcatgatcaatcaattggcacacagcaatgggaacatagccctttgggagagttgtgtccaccaggatctcatagatcagaacatcctggagcctgtaaccggtgcacagagggtgtgggttacaccaatgcttccaacaatttgtttgcttgcctcccatgtacagcttgtaaatcagatgaagaagagagaagtccctgcaccacgaccaggaacacagcatgtcagtgcaaaccaggaactttccggaatgacaattctgctgagatgtgccggaagtgcagcagagggtgccccagagggatggtcaaggtcaaggattgtacgccctggagtgacatcgagtgtgtccacaaagaatcaggcaatggacataatatatgggtgattttggttgtgactttggttgttccgttgctgttggtggctgtgctgattgtctgttgttgcatcggctcaggttgtggaggggaccccaagtgcatggacagggtgtgtttctggcgcttgggtctcctacgagggcctggggctgaggacaatgctcacaacgagattctgagcaacgcagactcgctgtccactttcgtctctgagcagcaaatggaaagccaggagccggcagatttgacaggtgtcactgtacagtccccaggggaggcacagtgtctgctgggaccggcagaagctgaagggtctcagaggaggaggctgctggttccagcaaatggtgctgaccccactgagactctgatgctgttctttgacaagtttgcaaacatcgtgccctttgactcctgggaccagctcatgaggcagctggacctcacgaaaaatgagatcgatgtggtcagagctggtacagcaggcccaggggatgccttgtatgcaatgctgatgaaatgggtcaacaaaactggacggaacgcctcgatccacaccctgctggatgccttggagaggatggaagagagacatgcaagagagaagattcaggacctcttggtggactctggaaagttcatctacttagaagatggcacaggctctgccgtgtccttggag

SEQ ID NO: 2254 - DNA, 783 bp, Homo sapiens
atggcacggccacatccctggtggctgtgcgttctggggaccctggtggggctctcagctactccagcccccaagagctgcccagagaggcactactgggctcagggaaagctgtgctgccagatgtgtgagccaggaacattcctcgtgaaggactgtgaccagcatagaaaggctgctcagtgtgatccttgcataccgggggtctccttctctcctgaccaccacacccggccccactgtgagagctgtcggcactgtaactctggtcttctcgttcgcaactgcaccatcactgccaatgctgagtgtgcctgtcgcaatggctggcagtgcagggacaaggagtgcaccgagtgtgatcctcttccaaacccttcgctgaccgctcggtcgtctcaggccctgagcccacaccctcagcccacccacttaccttatgtcagtgagatgctggaggccaggacagctgggcacatgcagactctggctgacttcaggcagctgcctgcccggactctctctacccactggccaccccaaagatccctgtgcagctccgattttattcgcatccttgtgatcttctctggaatgttccttgttttcaccctggccggggccctgttcctccatcaacgaaggaaatatagatcaaacaaaggagaaagtcctgtggagcctgcagagccttgtcgttacagctgccccagggaggaggagggcagcaccatccccatccaggaggattaccgaaaaccggagcctgcctgctccccctga

SEQ ID NO: 2255 - DNA, 663 bp, Homo sapiens
atgctcaggctgctcttggctctcaacttattcccttcaattcaagtaacaggaaacaagattttggtgaagcagtcgcccatgcttgtagcgtacgacaatgcggtcaaccttagctgcaagtattcctacaatctcttctcaagggagttccgggcatcccttcacaaaggactggatagtgctgtggaagtctgtgttgtatatgggaattactcccagcagcttcaggtttactcaaaaacggggttcaactgtgatgggaaattgggcaatgaatcagtgacattctacctccagaatttgtatgttaaccaaacagatatttacttctgcaaaattgaagttatgtatcctcctccttacctagacaatgagaagagcaatggaaccattatccatgtgaaagggaaacacctttgtccaagtcccctatttcccggaccttctaagcccttttgggtgctggtggtggttggtggagtcctggcttgctatagcttgctagtaacagtggcctttattattttctgggtgaggagtaagaggagcaggctcctgcacagtgactacatgaacatgactccccgccgccccgggcccacccgcaagcattaccagccctatgccccaccacgcgacttcgcagcctatcgctcctga

SEQ ID NO: 2256 - DNA, 768 bp, Homo sapiens
atgggaaacagctgttacaacatagtagccactctgttgctggtcctcaactttgagaggacaagatcattgcaggatccttgtagtaactgcccagctggtacattctgtgataataacaggaatcagatttgcagtccctgtcctccaaatagtttctccagcgcaggtggacaaaggacctgtgacatatgcaggcagtgtaaaggtgttttcaggaccaggaaggagtgttcctccaccagcaatgcagagtgtgactgcactccagggtttcactgcctgggggcaggatgcagcatgtgtgaacaggattgtaaacaaggtcaagaactgacaaaaaaaggttgtaaagactgttgctttgggacatttaacgatcagaaacgtggcatctgtcgaccctggacaaactgttctttggatggaaagtctgtgcttgtgaatgggacgaaggagagggacgtggtctgtggaccatctccagccgacctctctccgggagcatcctctgtgaccccgcctgcccctgcgagagagccaggacactctccgcagatcatctccttctttcttgcgctgacgtcgactgcgttgctcttcctgctgttcttcctcacgctccgtttctctgttgttaaacggggcagaaagaaactcctgtatatattcaaacaaccatttatgagaccagtacaaactactcaagaggaagatggctgtagctgccgatttccagaagaagaagaaggaggatgtgaactgtga

SEQ ID NO: 2257 - DNA, 834 bp, Homo sapiens
atgtgcgtgggggctcggcggctgggccgcgggccgtgtgcggctctgctcctcctgggcctggggctgagcaccgtgacggggctccactgtgtcggggacacctaccccagcaacgaccggtgctgccacgagtgcaggccaggcaacgggatggtgagccgctgcagccgctcccagaacacggtgtgccgtccgtgcgggccgggcttctacaacgacgtggtcagctccaagccgtgcaagccctgcacgtggtgtaacctcagaagtgggagtgagcggaagcagctgtgcacggccacacaggacacagtctgccgctgccgggcgggcacccagcccctggacagctacaagcctggagttgactgtgccccctgccctccagggcacttctccccaggcgacaaccaggcctgcaagccctggaccaactgcaccttggctgggaagcacaccctgcagccggccagcaatagctcggacgcaatctgtgaggacagggaccccccagccacgcagccccaggagacccagggccccccggccaggcccatcactgtccagcccactgaagcctggcccagaacctcacagggaccctccacccggcccgtggaggtccccgggggccgtgcggttgccgccatcctgggcctgggcctggtgctggggctgctgggccccctggccatcctgctggccctgtacctgctccggagggaccagaggctgccccccgatgcccacaagccccctgggggaggcagtttccggacccccatccaagaggagcaggccgacgcccactccaccctggccaagatctga

SEQ ID NO: 2258 - DNA, 726 bp, Homo sapiens
atggcacagcacggggcgatgggcgcgtttcgggccctgtgcggcctggcgctgctgtgcgcgctcagcctgggtcagcgccccaccgggggtcccgggtgcggccctgggcgcctcctgcttgggacgggaacggacgcgcgctgctgccgggttcacacgacgcgctgctgccgcgattacccgggcgaggagtgctgttccgagtgggactgcatgtgtgtccagcctgaattccactgcggagacccttgctgcacgacctgccggcaccacccttgtcccccaggccagggggtacagtcccaggggaaattcagttttggcttccagtgtatcgactgtgcctcggggaccttctccgggggccacgaaggccactgcaaaccttggacagactgcacccagttcgggtttctcactgtgttccctgggaacaagacccacaacgctgtgtgcgtcccagggtccccgccggcagagccgcttgggtggctgaccgtcgtcctcctggccgtggccgcctgcgtcctcctcctgacctcggcccagcttggactgcacatctggcagctgaggagtcagtgcatgtggccccgagagacccagctgctgctggaggtgccgccgtcgaccgaagacgccagaagctgccagttccccgaggaagagcggggcgagcgatcggcagaggagaaggggcggctgggagacctgtgggtgtga

SEQ ID NO: 2259 - DNA, 555 bp, Homo sapiens
atgctgcaaatggccggacagtgcagccagaacgagtatttcgacagcctgctgcacgcctgcattccctgccagctgagatgcagcagcaacacccctccactgacctgccagagatactgcaatgccagcgtgaccaacagcgtgaagggcaccaatgccatcctgtggacatgtctgggcctgagcctgattatcagcctggccgtgttcgtgctgatgttcctgctgcggaagatcaacagcgagcccctgaaggacgagttcaagaataccggctctggcctgctcggcatggctaacatcgacctggaaaagagcagaaccggcgacgagatcatcctgccaaggggccttgagtacaccgtggaagagtgtacctgcgaggactgcatcaagagcaagcccaaggtggacagcgaccactgctttccactgcctgctatggaagagggcgctaccatcctggtcaccaccaagaccaacgactactgcaagagcctgcctgccgctctgtctgccaccgagatcgagaagtctatcagcgccagatga

SEQ ID NO: 2260 - DNA, 1323 bp, Artificial Sequence
  Synthetic Polynucleotide
atggaacaacggggacagaacgccccggccgcttcgggggcccggaaaaggcacggcccaggacccagggaggcgcggggagccaggcctgggccccgggtccccaagacccttgtgctcgttgtcgccgcggtcctgctgttggtctcagctgagtctgctctgatcacccaacaagacctagctccccagcagagagcggccccacaacaaaagaggtccagcccctcagagggattgtgtccacctggacaccatatctcagaagacggtagagattgcatctcctgcaaatatggacaggactatagcactcactggaatgacctccttttctgcttgcgctgcaccaggtgtgattcaggtgaagtggagctaagtccctgcaccacgaccagaaacacagtgtgtcagtgcgaagaaggcaccttccgggaagaagattctcctgagatgtgccggaagtgccgcacagggtgtcccagagggatggtcaaggtcggtgattgtacaccctggagtgacatcgaatgtgtccacaaagaatcaggtacaaagcacagtggggaagtcccagctgtggaggagacggtgacctccagcccagggactcctgcctctccctgttctctctcaggcatcatcataggagtcacagttgcagccgtagtcttgattgtggctgtgtttgtttgcaagtctttactgtggaagaaagtccttccttacctgaaaggcatctgctcaggtggtggtggggaccctgagcgtgtggacagaagctcacaacgacctggggctgaggacaatgtcctcaatgagatcgtgagtatcttgcagcccacccaggtccctgagcaggaaatggaagtccaggagccagcagagccaacaggtgtcaacatgttgtcccccggggagtcagagcatctgctggaaccggcagaagctgaaaggtctcagaggaggaggctgctggttccagcaaatgaaggtgatcccactgagactctgagacagtgcttcgatgactttgcagacttggtgccctttgactcctgggagccgctcatgaggaagttgggcaacatggacaatgagataaaggtggctaaagctgaggcagcgggccacagggacaccttgtacacgatgctgataaagtgggtcaacaaaaccgggcgagatgcctctgtccacaccctgctggatgccttggagacgctgggagagagacttgccaagcagaagattgaggaccacttgttgagctctggaaagttcatgtatctagaaggtaatgcagactctgccatgtcctaa

SEQ ID NO: 2261 - DNA, 14 bp, Artificial Sequence
  Synthetic Polynucleotide
  misc_feature (1)..(14): n is a, c, g, or t
nnnnnnnnnnnnnn

SEQ ID NO: 2262 - DNA, 75 bp, Artificial Sequence
  Synthetic Polynucleotide
atggcccggatccccaagaccctaaagttcgtcgtcgtcatcgtcgcggtcctgctgccagtcctagcttactct

SEQ ID NO: 2263 - DNA, 563 bp, Artificial Sequence
  Synthetic Polynucleotide
atggcccggatccccaagaccctaaagttcgtcgtcgtcatcgtcgcggtcctgctgccagtcctagcttactctgccaccactgcccggcaggaggaagttccccagcagacagtggccccacagcaacagaggcacagcttcaagggggaggagtgtccagcaggatctcatagatcagaacatactggagcctgtaacccgtgcacagagggtgtggattacaccaacgcttccaacaatgaaccttcttgcttcccatgtacagtttgtaaatcagatcaaaaacataaaagttcctgcaccatgaccagagacacagtgtgtcagtgtaaagaaggcaccttccggaatgaaaactccccagagatgtgccggaagtgtagcaggtgccctagtggggaagtccaagtcagtaattgtacgtcctgggatgatatccagtgtgttgaagaatttggtgccaatgccactgtggaaaccccagctgctgaagagacaatgaacaccagcccggggactcctgccccagctgctgaagagacaatgaacaccagcccagg

SEQ ID NO: 2264 - DNA, 780 bp, Artificial Sequence; identical to SEQ ID NO: 2250
  Synthetic Polynucleotide

SEQ ID NO: 2265 - DNA, 651 bp, Artificial Sequence
  Synthetic Polynucleotide
gccaccactgcccggcaggaggaagttccccagcagacagtggccccacagcaacagaggcacagcttcaagggggaggagtgtccagcaggatctcatagatcagaacatactggagcctgtaacccgtgcacagagggtgtggattacaccaacgcttccaacaatgaaccttcttgcttcccatgtacagtttgtaaatcagatcaaaaacataaaagttcctgcaccatgaccagagacacagtgtgtcagtgtaaagaaggcaccttccggaatgaaaactccccagagatgtgccggaagtgtagcaggtgccctagtggggaagtccaagtcagtaattgtacgtcctgggatgatatccagtgtgttgaagaatttggtgccaatgccactgtggaaaccccagctgctgaagagacaatgaacaccagcccggggactcctgccccagctgctgaagagacaatgaacaccagcccagggactcctgccccagctgctgaagagacaatgaccaccagcccggggactcctgccccagctgctgaagagacaatgaccaccagcccggggactcctgccccagctgctgaagagacaatgaccaccagcccggggactcctgcctcttctcattacctctca

SEQ ID NO: 2266 - DNA, 51 bp, Artificial Sequence
  Synthetic Polynucleotide
tgcaccatcgtagggatcatagttctaattgtgcttctgattgtgtttgtt

SEQ ID NO: 2267 - DNA, 165 bp, Artificial Sequence
  Synthetic Polynucleotide
atgggactttggggacaaagcgtcccgaccgcctcgagcgctcgagcagggcgctatccaggagccaggacagcgtcgggaaccagaccatggctcctggaccccaagatccttaagttcgtcgtcttcatcgtcgcggttctgctgccggtccgggttgactct

SEQ ID NO: 2268 - DNA, 636 bp, Artificial Sequence
  Synthetic Polynucleotide
atgggactttggggacaaagcgtcccgaccgcctcgagcgctcgagcagggcgctatccaggagccaggacagcgtcgggaaccagaccatggctcctggaccccaagatccttaagttcgtcgtcttcatcgtcgcggttctgctgccggtccgggttgactctgccaccatcccccggcaggacgaagttccccagcagacagtggccccacagcaacagaggcgcagcctcaaggaggaggagtgtccagcaggatctcatagatcagaatatactggagcctgtaacccgtgcacagagggtgtggattacaccattgcttccaacaatttgccttcttgcctgctatgtacagtttgtaaatcaggtcaaacaaataaaagttcctgtaccacgaccagagacaccgtgtgtcagtgtgaaaaaggaagcttccaggataaaaactcccctgagatgtgccggacgtgtagaacagggtgtcccagagggatggtcaaggtcagtaattgtacgccccggagtgacatcaagtgcaaaaatgaatcagctgccagttccactgggaaaaccccagcagcggaggagacagtgaccaccatcctggggatgcttgcctctccctatcactac

SEQ ID NO: 2269 - DNA, 696 bp, Artificial Sequence
  Synthetic Polynucleotide
atgggactttggggacaaagcgtcccgaccgcctcgagcgctcgagcagggcgctatccaggagccaggacagcgtcgggaaccagaccatggctcctggaccccaagatccttaagttcgtcgtcttcatcgtcgcggttctgctgccggtccgggttgactctgccaccatcccccggcaggacgaagttccccagcagacagtggccccacagcaacagaggcgcagcctcaaggaggaggagtgtccagcaggatctcatagatcagaatatactggagcctgtaacccgtgcacagagggtgtggattacaccattgcttccaacaatttgccttcttgcctgctatgtacagtttgtaaatcaggtcaaacaaataaaagttcctgtaccacgaccagagacaccgtgtgtcagtgtgaaaaaggaagcttccaggataaaaactcccctgagatgtgccggacgtgtagaacagggtgtcccagagggatggtcaaggtcagtaattgtacgccccggagtgacatcaagtgcaaaaatgaatcagctgccagttccactgggaaaaccccagcagcggaggagacagtgaccaccatcctggggatgcttgcctctccctatcactaccttatcatcatagtggttttagtcatcattttagctgtggttgtggttggcttttcatgt

SEQ ID NO: 2270 - DNA, 471 bp, Artificial Sequence
  Synthetic Polynucleotide
gccaccatcccccggcaggacgaagttccccagcagacagtggccccacagcaacagaggcgcagcctcaaggaggaggagtgtccagcaggatctcatagatcagaatatactggagcctgtaacccgtgcacagagggtgtggattacaccattgcttccaacaatttgccttcttgcctgctatgtacagtttgtaaatcaggtcaaacaaataaaagttcctgtaccacgaccagagacaccgtgtgtcagtgtgaaaaaggaagcttccaggataaaaactcccctgagatgtgccggacgtgtagaacagggtgtcccagagggatggtcaaggtcagtaattgtacgccccggagtgacatcaagtgcaaaaatgaatcagctgccagttccactgggaaaaccccagcagcggaggagacagtgaccaccatcctggggatgcttgcctctccctatcactac

SEQ ID NO: 2271 - DNA, 60 bp, Artificial Sequence
  Synthetic Polynucleotide
cttatcatcatagtggttttagtcatcattttagctgtggttgtggttggcttttcatgt

SEQ ID NO: 2272 - DNA, 465 bp, Artificial Sequence
  Synthetic Polynucleotide
cggaagaaattcatttcttacctcaaaggcatctgctcaggtggtggaggaggtcccgaacgtgtgcacagagtccttttccggcggcgttcatgtccttcacgagttcctggggcggaggacaatgcccgcaacgagaccctgagtaacagatacttgcagcccacccaggtctctgagcaggaaatccaaggtcaggagctggcagagctaacaggtgtgactgtagagttgccagaggagccacagcgtctgctggaacaggcagaagctgaagggtgtcagaggaggaggctgctggttccagtgaatgacgctgactccgctgacatcagcaccttgctggatgcctcggcaacactggaagaaggacatgcaaaggaaacaattcaggaccaactggtgggctccgaaaagctcttttatgaagaagatgaggcaggctctgctacgtcctgcctgtga

SEQ ID NO: 2273 - DNA, 153 bp, Artificial Sequence
  Synthetic Polynucleotide
atgggacagcacggacccagtgcccgggcccgggcagggcgcgccccaggacccaggccggcgcgggaagccagccctcggctccgggtccacaagaccttcaagtttgtcgtcgtcggggtcctgctgcaggtcgtacctagctcagctgca

SEQ ID NO: 2274 - DNA, 543 bp, Artificial Sequence
  Synthetic Polynucleotide
atgggacagcacggacccagtgcccgggcccgggcagggcgcgccccaggacccaggccggcgcgggaagccagccctcggctccgggtccacaagaccttcaagtttgtcgtcgtcggggtcctgctgcaggtcgtacctagctcagctgcaaccatcaaacttcatgatcaatcaattggcacacagcaatgggaacatagccctttgggagagttgtgtccaccaggatctcatagatcagaacatcctggagcctgtaaccggtgcacagagggtgtgggttacaccaatgcttccaacaatttgtttgcttgcctcccatgtacagcttgtaaatcagatgaagaagagagaagtccctgcaccacgaccaggaacacagcatgtcagtgcaaaccaggaactttccggaatgacaattctgctgagatgtgccggaagtgcagcagagggtgccccagagggatggtcaaggtcaaggattgtacgccctggagtgacatcgagtgtgtccacaaagaatcaggcaatggacataat

SEQ ID NO: 2275 - DNA, 612 bp, Artificial Sequence
  Synthetic Polynucleotide
atgggacagcacggacccagtgcccgggcccgggcagggcgcgccccaggacccaggccggcgcgggaagccagccctcggctccgggtccacaagaccttcaagtttgtcgtcgtcggggtcctgctgcaggtcgtacctagctcagctgcaaccatcaaacttcatgatcaatcaattggcacacagcaatgggaacatagccctttgggagagttgtgtccaccaggatctcatagatcagaacatcctggagcctgtaaccggtgcacagagggtgtgggttacaccaatgcttccaacaatttgtttgcttgcctcccatgtacagcttgtaaatcagatgaagaagagagaagtccctgcaccacgaccaggaacacagcatgtcagtgcaaaccaggaactttccggaatgacaattctgctgagatgtgccggaagtgcagcagagggtgccccagagggatggtcaaggtcaaggattgtacgccctggagtgacatcgagtgtgtccacaaagaatcaggcaatggacataatatatgggtgattttggttgtgactttggttgttccgttgctgttggtggctgtgctgattgtctgttgt

SEQ ID NO: 2276 - DNA, 390 bp, Artificial Sequence
  Synthetic Polynucleotide
accatcaaacttcatgatcaatcaattggcacacagcaatgggaacatagccctttgggagagttgtgtccaccaggatctcatagatcagaacatcctggagcctgtaaccggtgcacagagggtgtgggttacaccaatgcttccaacaatttgtttgcttgcctcccatgtacagcttgtaaatcagatgaagaagagagaagtccctgcaccacgaccaggaacacagcatgtcagtgcaaaccaggaactttccggaatgacaattctgctgagatgtgccggaagtgcagcagagggtgccccagagggatggtcaaggtcaaggattgtacgccctggagtgacatcgagtgtgtccacaaagaatcaggcaatggacataat

SEQ ID NO: 2277 - DNA, 69 bp, Artificial Sequence
  Synthetic Polynucleotide
atatgggtgattttggttgtgactttggttgttccgttgctgttggtggctgtgctgattgtctgttgt

SEQ ID NO: 2278 - DNA, 618 bp, Artificial Sequence
  Synthetic Polynucleotide
tgcatcggctcaggttgtggaggggaccccaagtgcatggacagggtgtgtttctggcgcttgggtctcctacgagggcctggggctgaggacaatgctcacaacgagattctgagcaacgcagactcgctgtccactttcgtctctgagcagcaaatggaaagccaggagccggcagatttgacaggtgtcactgtacagtccccaggggaggcacagtgtctgctgggaccggcagaagctgaagggtctcagaggaggaggctgctggttccagcaaatggtgctgaccccactgagactctgatgctgttctttgacaagtttgcaaacatcgtgccctttgactcctgggaccagctcatgaggcagctggacctcacgaaaaatgagatcgatgtggtcagagctggtacagcaggcccaggggatgccttgtatgcaatgctgatgaaatgggtcaacaaaactggacggaacgcctcgatccacaccctgctggatgccttggagaggatggaagagagacatgcaagagagaagattcaggacctcttggtggactctggaaagttcatctacttagaagatggcacaggctctgccgtgtccttggag

SEQ ID NO: 2279 - DNA, 165 bp, Artificial Sequence
  Synthetic Polynucleotide
atggaacaacggggacagaacgccccggccgcttcgggggcccggaaaaggcacggcccaggacccagggaggcgcggggagccaggcctgggccccgggtccccaagacccttgtgctcgttgtcgccgcggtcctgctgttggtctcagctgagtctgctctg

SEQ ID NO: 2280 - DNA, 630 bp, Artificial Sequence
  Synthetic Polynucleotide
atggaacaacggggacagaacgccccggccgcttcgggggcccggaaaaggcacggcccaggacccagggaggcgcggggagccaggcctgggccccgggtccccaagacccttgtgctcgttgtcgccgcggtcctgctgttggtctcagctgagtctgctctgatcacccaacaagacctagctccccagcagagagcggccccacaacaaaagaggtccagcccctcagagggattgtgtccacctggacaccatatctcagaagacggtagagattgcatctcctgcaaatatggacaggactatagcactcactggaatgacctccttttctgcttgcgctgcaccaggtgtgattcaggtgaagtggagctaagtccctgcaccacgaccagaaacacagtgtgtcagtgcgaagaaggcaccttccgggaagaagattctcctgagatgtgccggaagtgccgcacagggtgtcccagagggatggtcaaggtcggtgattgtacaccctggagtgacatcgaatgtgtccacaaagaatcaggtacaaagcacagtggggaagtcccagctgtggaggagacggtgacctccagcccagggactcctgcctctccctgttct

SEQ ID NO: 2281 - DNA, 693 bp, Artificial Sequence
  Synthetic Polynucleotide
atggaacaacggggacagaacgccccggccgcttcgggggcccggaaaaggcacggcccaggacccagggaggcgcggggagccaggcctgggccccgggtccccaagacccttgtgctcgttgtcgccgcggtcctgctgttggtctcagctgagtctgctctgatcacccaacaagacctagctccccagcagagagcggccccacaacaaaagaggtccagcccctcagagggattgtgtccacctggacaccatatctcagaagacggtagagattgcatctcctgcaaatatggacaggactatagcactcactggaatgacctccttttctgcttgcgctgcaccaggtgtgattcaggtgaagtggagctaagtccctgcaccacgaccagaaacacagtgtgtcagtgcgaagaaggcaccttccgggaagaagattctcctgagatgtgccggaagtgccgcacagggtgtcccagagggatggtcaaggtcggtgattgtacaccctggagtgacatcgaatgtgtccacaaagaatcaggtacaaagcacagtggggaagtcccagctgtggaggagacggtgacctccagcccagggactcctgcctctccctgttctctctcaggcatcatcataggagtcacagttgcagccgtagtcttgattgtggctgtgtttgtt

SEQ ID NO: 2282 - DNA, 465 bp, Artificial Sequence
  Synthetic Polynucleotide
atcacccaacaagacctagctccccagcagagagcggccccacaacaaaagaggtccagcccctcagagggattgtgtccacctggacaccatatctcagaagacggtagagattgcatctcctgcaaatatggacaggactatagcactcactggaatgacctccttttctgcttgcgctgcaccaggtgtgattcaggtgaagtggagctaagtccctgcaccacgaccagaaacacagtgtgtcagtgcgaagaaggcaccttccgggaagaagattctcctgagatgtgccggaagtgccgcacagggtgtcccagagggatggtcaaggtcggtgattgtacaccctggagtgacatcgaatgtgtccacaaagaatcaggtacaaagcacagtggggaagtcccagctgtggaggagacggtgacctccagcccagggactcctgcctctccctgttct

SEQ ID NO: 2283 - DNA, 63 bp, Artificial Sequence
  Synthetic Polynucleotide
ctctcaggcatcatcataggagtcacagttgcagccgtagtcttgattgtggctgtgtttgtt

SEQ ID NO: 2284 - DNA, 630 bp, Artificial Sequence
  Synthetic Polynucleotide
tgcaagtctttactgtggaagaaagtccttccttacctgaaaggcatctgctcaggtggtggtggggaccctgagcgtgtggacagaagctcacaacgacctggggctgaggacaatgtcctcaatgagatcgtgagtatcttgcagcccacccaggtccctgagcaggaaatggaagtccaggagccagcagagccaacaggtgtcaacatgttgtcccccggggagtcagagcatctgctggaaccggcagaagctgaaaggtctcagaggaggaggctgctggttccagcaaatgaaggtgatcccactgagactctgagacagtgcttcgatgactttgcagacttggtgccctttgactcctgggagccgctcatgaggaagttgggcctcatggacaatgagataaaggtggctaaagctgaggcagcgggccacagggacaccttgtacacgatgctgataaagtgggtcaacaaaaccgggcgagatgcctctgtccacaccctgctggatgccttggagacgctgggagagagacttgccaagcagaagattgaggaccacttgttgagctctggaaagttcatgtatctagaaggtaatgcagactctgccatgtcctaa

SEQ ID NO: 2285 - DNA, 75 bp, Artificial Sequence
  Synthetic Polynucleotide
atggcacagcacggggcgatgggcgcgtttcgggccctgtgcggcctggcgctgctgtgcgcgctcagcctgggt

SEQ ID NO: 2286 - DNA, 489 bp, Artificial Sequence
  Synthetic Polynucleotide
atggcacagcacggggcgatgggcgcgtttcgggccctgtgcggcctggcgctgctgtgcgcgctcagcctgggtcagcgccccaccgggggtcccgggtgcggccctgggcgcctcctgcttgggacgggaacggacgcgcgctgctgccgggttcacacgacgcgctgctgccgcgattacccgggcgaggagtgctgttccgagtgggactgcatgtgtgtccagcctgaattccactgcggagacccttgctgcacgacctgccggcaccacccttgtcccccaggccagggggtacagtcccaggggaaattcagttttggcttccagtgtatcgactgtgcctcggggaccttctccgggggccacgaaggccactgcaaaccttggacagactgcacccagttcgggtttctcactgtgttccctgggaacaagacccacaacgctgtgtgcgtcccagggtccccgccggcagagccgctt

SEQ ID NO: 2287 - DNA, 414 bp, Artificial Sequence
  Synthetic Polynucleotide
cagcgccccaccgggggtcccgggtgcggccctgggcgcctcctgcttgggacgggaacggacgcgcgctgctgccgggttcacacgacgcgctgctgccgcgattacccgggcgaggagtgctgttccgagtgggactgcatgtgtgtccagcctgaattccactgcggagacccttgctgcacgacctgccggcaccacccttgtcccccaggccagggggtacagtcccaggggaaattcagttttggcttccagtgtatcgactgtgcctcggggaccttctccgggggccacgaaggccactgcaaaccttggacagactgcacccagttcgggtttctcactgtgttccctgggaacaagacccacaacgctgtgtgcgtcccagggtccccgccggcagagccgctt

SEQ ID NO: 2288 - DNA, 414 bp, Artificial Sequence; identical to SEQ ID NO: 2287
  Synthetic Polynucleotide

SEQ ID NO: 2289 - DNA, 60 bp, Artificial Sequence
  Synthetic Polynucleotide
gggtggctgaccgtcgtcctcctggccgtggccgcctgcgtcctcctcctgacctcggcc

SEQ ID NO: 2290 - DNA, 174 bp, Artificial Sequence
  Synthetic Polynucleotide
cagcttggactgcacatctggcagctgaggagtcagtgcatgtggccccgagagacccagctgctgctggaggtgccgccgtcgaccgaagacgccagaagctgccagttccccgaggaagagcggggcgagcgatcggcagaggagaaggggcggctgggagacctgtgggtg

SEQ ID NO: 2291 - DNA, 87 bp, Artificial Sequence
  Synthetic Polynucleotide
atgtgcgtgggggctcggcggctgggccgcgggccgtgtgcggctctgctcctcctgggcctggggctgagcaccgtgacggggctc

SEQ ID NO: 2292 - DNA, 651 bp, Artificial Sequence
  Synthetic Polynucleotide
atgtgcgtgggggctcggcggctgggccgcgggccgtgtgcggctctgctcctcctgggcctggggctgagcaccgtgacggggctccactgtgtcggggacacctaccccagcaacgaccggtgctgccacgagtgcaggccaggcaacgggatggtgagccgctgcagccgctcccagaacacggtgtgccgtccgtgcgggccgggcttctacaacgacgtggtcagctccaagccgtgcaagccctgcacgtggtgtaacctcagaagtgggagtgagcggaagcagctgtgcacggccacacaggacacagtctgccgctgccgggcgggcacccagcccctggacagctacaagcctggagttgactgtgccccctgccctccagggcacttctccccaggcgacaaccaggcctgcaagccctggaccaactgcaccttggctgggaagcacaccctgcagccggccagcaatagctcggacgcaatctgtgaggacagggaccccccagccacgcagccccaggagacccagggccccccggccaggcccatcactgtccagcccactgaagcctggcccagaacctcacagggaccctccacccggcccgtggaggtccccgggggccgtgcggttgccgcc

SEQ ID NO: 2293 - DNA, 720 bp, Artificial Sequence
  Synthetic Polynucleotide
atgtgcgtgggggctcggcggctgggccgcgggccgtgtgcggctctgctcctcctgggcctggggctgagcaccgtgacggggctccactgtgtcggggacacctaccccagcaacgaccggtgctgccacgagtgcaggccaggcaacgggatggtgagccgctgcagccgctcccagaacacggtgtgccgtccgtgcgggccgggcttctacaacgacgtggtcagctccaagccgtgcaagccctgcacgtggtgtaacctcagaagtgggagtgagcggaagcagctgtgcacggccacacaggacacagtctgccgctgccgggcgggcacccagcccctggacagctacaagcctggagttgactgtgccccctgccctccagggcacttctccccaggcgacaaccaggcctgcaagccctggaccaactgcaccttggctgggaagcacaccctgcagccggccagcaatagctcggacgcaatctgtgaggacagggaccccccagccacgcagccccaggagacccagggccccccggccaggcccatcactgtccagcccactgaagcctggcccagaacctcacagggaccctccacccggcccgtggaggtccccgggggccgtgcggttgccgccatcctgggcctgggcctggtgctggggctgctgggccccctggccatcctgctggccctgtacctgctc

SEQ ID NO: 2294 - DNA, 564 bp, Artificial Sequence
  Synthetic Polynucleotide
cactgtgtcggggacacctaccccagcaacgaccggtgctgccacgagtgcaggccaggcaacgggatggtgagccgctgcagccgctcccagaacacggtgtgccgtccgtgcgggccgggcttctacaacgacgtggtcagctccaagccgtgcaagccctgcacgtggtgtaacctcagaagtgggagtgagcggaagcagctgtgcacggccacacaggacacagtctgccgctgccgggcgggcacccagcccctggacagctacaagcctggagttgactgtgccccctgccctccagggcacttctccccaggcgacaaccaggcctgcaagccctggaccaactgcaccttggctgggaagcacaccctgcagccggccagcaatagctcggacgcaatctgtgaggacagggaccccccagccacgcagccccaggagacccagggccccccggccaggcccatcactgtccagcccactgaagcctggcccagaacctcacagggaccctccacccggcccgtggaggtccccgggggccgtgcggttgccgcc

SEQ ID NO: 2295 - DNA, 69 bp, Artificial Sequence
  Synthetic Polynucleotide
atcctgggcctgggcctggtgctggggctgctgggccccctggccatcctgctggccctgtacctgctc

SEQ ID NO: 2296 - DNA, 111 bp, Artificial Sequence
  Synthetic Polynucleotide
cggagggaccagaggctgccccccgatgcccacaagccccctgggggaggcagtttccggacccccatccaagaggagcaggccgacgcccactccaccctggccaagatc

SEQ ID NO: 2297 - DNA, 72 bp, Artificial Sequence
  Synthetic Polynucleotide
atggcacggccacatccctggtggctgtgcgttctggggaccctggtggggctctcagctactccagccccc

SEQ ID NO: 2298 - DNA, 573 bp, Artificial Sequence
  Synthetic Polynucleotide
atggcacggccacatccctggtggctgtgcgttctggggaccctggtggggctctcagctactccagcccccaagagctgcccagagaggcactactgggctcagggaaagctgtgctgccagatgtgtgagccaggaacattcctcgtgaaggactgtgaccagcatagaaaggctgctcagtgtgatccttgcataccgggggtctccttctctcctgaccaccacacccggccccactgtgagagctgtcggcactgtaactctggtcttctcgttcgcaactgcaccatcactgccaatgctgagtgtgcctgtcgcaatggctggcagtgcagggacaaggagtgcaccgagtgtgatcctcttccaaacccttcgctgaccgctcggtcgtctcaggccctgagcccacaccctcagcccacccacttaccttatgtcagtgagatgctggaggccaggacagctgggcacatgcagactctggctgacttcaggcagctgcctgcccggactctctctacccactggccaccccaaagatccctgtgcagctccgattttattcgc

SEQ ID NO: 2299 - DNA, 636 bp, Artificial Sequence
  Synthetic Polynucleotide
atggcacggccacatccctggtggctgtgcgttctggggaccctggtggggctctcagctactccagcccccaagagctgcccagagaggcactactgggctcagggaaagctgtgctgccagatgtgtgagccaggaacattcctcgtgaaggactgtgaccagcatagaaaggctgctcagtgtgatccttgcataccgggggtctccttctctcctgaccaccacacccggccccactgtgagagctgtcggcactgtaactctggtcttctcgttcgcaactgcaccatcactgccaatgctgagtgtgcctgtcgcaatggctggcagtgcagggacaaggagtgcaccgagtgtgatcctcttccaaacccttcgctgaccgctcggtcgtctcaggccctgagcccacaccctcagcccacccacttaccttatgtcagtgagatgctggaggccaggacagctgggcacatgcagactctggctgacttcaggcagctgcctgcccggactctctctacccactggccaccccaaagatccctgtgcagctccgattttattcgcatccttgtgatcttctctggaatgttccttgttttcaccctggccggggccctgttcctccat

SEQ ID NO: 2300 - DNA, 501 bp, Artificial Sequence
  Synthetic Polynucleotide
aagagctgcccagagaggcactactgggctcagggaaagctgtgctgccagatgtgtgagccaggaacattcctcgtgaaggactgtgaccagcatagaaaggctgctcagtgtgatccttgcataccgggggtctccttctctcctgaccaccacacccggccccactgtgagagctgtcggcactgtaactctggtcttctcgttcgcaactgcaccatcactgccaatgctgagtgtgcctgtcgcaatggctggcagtgcagggacaaggagtgcaccgagtgtgatcctcttccaaacccttcgctgaccgctcggtcgtctcaggccctgagcccacaccctcagcccacccacttaccttatgtcagtgagatgctggaggccaggacagctgggcacatgcagactctggctgacttcaggcagctgcctgcccggactctctctacccactggccaccccaaagatccctgtgcagctccgattttattcgc

SEQ ID NO: 2301 - DNA, 63 bp, Artificial Sequence
  Synthetic Polynucleotide
atccttgtgatcttctctggaatgttccttgttttcaccctggccggggccctgttcctccat

SEQ ID NO: 2302 - DNA, 144 bp, Artificial Sequence
  Synthetic Polynucleotide
caacgaaggaaatatagatcaaacaaaggagaaagtcctgtggagcctgcagagccttgtcgttacagctgccccagggaggaggagggcagcaccatccccatccaggaggattaccgaaaaccggagcctgcctgctccccc

SEQ ID NO: 2303 - DNA, 51 bp, Artificial Sequence
  Synthetic Polynucleotide
atgggaaacagctgttacaacatagtagccactctgttgctggtcctcaac

SEQ ID NO: 2304 - DNA, 558 bp, Artificial Sequence
  Synthetic Polynucleotide
atgggaaacagctgttacaacatagtagccactctgttgctggtcctcaactttgagaggacaagatcattgcaggatccttgtagtaactgcccagctggtacattctgtgataataacaggaatcagatttgcagtccctgtcctccaaatagtttctccagcgcaggtggacaaaggacctgtgacatatgcaggcagtgtaaaggtgttttcaggaccaggaaggagtgttcctccaccagcaatgcagagtgtgactgcactccagggtttcactgcctgggggcaggatgcagcatgtgtgaacaggattgtaaacaaggtcaagaactgacaaaaaaaggttgtaaagactgttgctttgggacatttaacgatcagaaacgtggcatctgtcgaccctggacaaactgttctttggatggaaagtctgtgcttgtgaatgggacgaaggagagggacgtggtctgtggaccatctccagccgacctctctccgggagcatcctctgtgaccccgcctgcccctgcgagagagccaggacactctccgcag

SEQ ID NO: 2305 - DNA, 639 bp, Artificial Sequence
  Synthetic Polynucleotide
atgggaaacagctgttacaacatagtagccactctgttgctggtcctcaactttgagaggacaagatcattgcaggatccttgtagtaactgcccagctggtacattctgtgataataacaggaatcagatttgcagtccctgtcctccaaatagtttctccagcgcaggtggacaaaggacctgtgacatatgcaggcagtgtaaaggtgttttcaggaccaggaaggagtgttcctccaccagcaatgcagagtgtgactgcactccagggtttcactgcctgggggcaggatgcagcatgtgtgaacaggattgtaaacaaggtcaagaactgacaaaaaaaggttgtaaagactgttgctttgggacatttaacgatcagaaacgtggcatctgtcgaccctggacaaactgttctttggatggaaagtctgtgcttgtgaatgggacgaaggagagggacgtggtctgtggaccatctccagccgacctctctccgggagcatcctctgtgaccccgcctgcccctgcgagagagccaggacactctccgcagatcatctccttctttcttgcgctgacgtcgactgcgttgctcttcctgctgttcttcctcacgctccgtttctctgttgtt

SEQ ID NO: 2306 - DNA, 507 bp, Artificial Sequence
  Synthetic Polynucleotide
tttgagaggacaagatcattgcaggatccttgtagtaactgcccagctggtacattctgtgataataacaggaatcagatttgcagtccctgtcctccaaatagtttctccagcgcaggtggacaaaggacctgtgacatatgcaggcagtgtaaaggtgttttcaggaccaggaaggagtgttcctccaccagcaatgcagagtgtgactgcactccagggtttcactgcctgggggcaggatgcagcatgtgtgaacaggattgtaaacaaggtcaagaactgacaaaaaaaggttgtaaagactgttgctttgggacatttaacgatcagaaacgtggcatctgtcgaccctggacaaactgttctttggatggaaagtctgtgcttgtgaatgggacgaaggagagggacgtggtctgtggaccatctccagccgacctctctccgggagcatcctctgtgaccccgcctgcccctgcgagagagccaggacactctccgcag

SEQ ID NO: 2307 - DNA, 81 bp, Artificial Sequence
  Synthetic Polynucleotide
atcatctccttctttcttgcgctgacgtcgactgcgttgctcttcctgctgttcttcctcacgctccgtttctctgttgtt

SEQ ID NO: 2308 - DNA, 126 bp, Artificial Sequence; identical to SEQ ID NO: 430
  Synthetic Polynucleotide

SEQ ID NO: 2309 - DNA, 54 bp, Artificial Sequence
  Synthetic Polynucleotide
atgctcaggctgctcttggctctcaacttattcccttcaattcaagtaacagga

SEQ ID NO: 2310 - DNA, 459 bp, Artificial Sequence
  Synthetic Polynucleotide
atgctcaggctgctcttggctctcaacttattcccttcaattcaagtaacaggaaacaagattttggtgaagcagtcgcccatgcttgtagcgtacgacaatgcggtcaaccttagctgcaagtattcctacaatctcttctcaagggagttccgggcatcccttcacaaaggactggatagtgctgtggaagtctgtgttgtatatgggaattactcccagcagcttcaggtttactcaaaaacggggttcaactgtgatgggaaattgggcaatgaatcagtgacattctacctccagaatttgtatgttaaccaaacagatatttacttctgcaaaattgaagttatgtatcctcctccttacctagacaatgagaagagcaatggaaccattatccatgtgaaagggaaacacctttgtccaagtcccctatttcccggaccttctaagcccttt

SEQ ID NO: 2311 - DNA, 537 bp, Artificial Sequence
  Synthetic Polynucleotide
atgctcaggctgctcttggctctcaacttattcccttcaattcaagtaacaggaaacaagattttggtgaagcagtcgcccatgcttgtagcgtacgacaatgcggtcaaccttagctgcaagtattcctacaatctcttctcaagggagttccgggcatcccttcacaaaggactggatagtgctgtggaagtctgtgttgtatatgggaattactcccagcagcttcaggtttactcaaaaacggggttcaactgtgatgggaaattgggcaatgaatcagtgacattctacctccagaatttgtatgttaaccaaacagatatttacttctgcaaaattgaagttatgtatcctcctccttacctagacaatgagaagagcaatggaaccattatccatgtgaaagggaaacacctttgtccaagtcccctatttcccggaccttctaagcccttttgggtgctggtggtggttggtggagtcctggcttgctatagcttgctagtaacagtggcctttattattttctgggtg

SEQ ID NO: 2312 - DNA, 405 bp, Artificial Sequence
  Synthetic Polynucleotide
aacaagattttggtgaagcagtcgcccatgcttgtagcgtacgacaatgcggtcaaccttagctgcaagtattcctacaatctcttctcaagggagttccgggcatcccttcacaaaggactggatagtgctgtggaagtctgtgttgtatatgggaattactcccagcagcttcaggtttactcaaaaacggggttcaactgtgatgggaaattgggcaatgaatcagtgacattctacctccagaatttgtatgttaaccaaacagatatttacttctgcaaaattgaagttatgtatcctcctccttacctagacaatgagaagagcaatggaaccattatccatgtgaaagggaaacacctttgtccaagtcccctatttcccggaccttctaagcccttt

SEQ ID NO: 2313 - DNA, 78 bp, Artificial Sequence
  Synthetic Polynucleotide
tgggtgctggtggtggttggtggagtcctggcttgctatagcttgctagtaacagtggcctttattattttctgggtg

SEQ ID NO: 2314 - DNA, 123 bp, Artificial Sequence
  Synthetic Polynucleotide
aggagtaagaggagcaggctcctgcacagtgactacatgaacatgactccccgccgccccgggcccacccgcaagcattaccagccctatgccccaccacgcgacttcgcagcctatcgctcc

SEQ ID NO: 2315 - DNA, 163 bp, Artificial Sequence
  Synthetic Polynucleotide
atgctgcaaatggccggacagtgcagccagaacgagtatttcgacagcctgctgcacgcctgcattccctgccagctgagatgcagcagcaacacccctccactgacctgccagagatactgcaatgccagcgtgaccaacagcgtgaagggcaccaatgcca

SEQ ID NO: 2316 - DNA, 69 bp, Artificial Sequence
  Synthetic Polynucleotide
atcctgtggacatgtctgggcctgagcctgattatcagcctggccgtgttcgtgctgatgttcctgctg

SEQ ID NO: 2317 - DNA, 321 bp, Artificial Sequence
  Synthetic Polynucleotide
cggaagatcaacagcgagcccctgaaggacgagttcaagaataccggctctggcctgctcggcatggctaacatcgacctggaaaagagcagaaccggcgacgagatcatcctgccaaggggccttgagtacaccgtggaagagtgtacctgcgaggactgcatcaagagcaagcccaaggtggacagcgaccactgctttccactgcctgctatggaagagggcgctaccatcctggtcaccaccaagaccaacgactactgcaagagcctgcctgccgctctgtctgccaccgagatcgagaagtctatcagcgccaga

SEQ ID NO: 2318 - DNA, 1329 bp, Artificial Sequence
  Synthetic Polynucleotide
atggaacaacggggacagaacgccccggccgcttcgggggcccggaaaaggcacggcccaggacccagggaggcgcggggagccaggcctgggccccgggtccccaagacccttgtgctcgttgtcgccgcggtcctgctgttggtctcagctgagtctgctctgatcacccaacaagacctagctccccagcagagagcggccccacaacaaaagaggtccagcccctcagagggattgtgtccacctggacaccatatctcagaagacggtagagattgcatctcctgcaaatatggacaggactatagcactcactggaatgacctccttttctgcttgcgctgcaccaggtgtgattcaggtgaagtggagctaagtccctgcaccacgaccagaaacacagtgtgtcagtgcgaagaaggcaccttccgggaagaagattctcctgagatgtgccggaagtgccgcacagggtgtcccagagggatggtcaaggtcggtgattgtacaccctggagtgacatcgaatgtgtccacaaagaatcaggtacaaagcacagtggggaagtcccagctgtggaggagacggtgacctccagcccagggactcctgcctctccctgttctgggggcagtggctcttgtgacaaaactcacacatgcccaccgtgcccagcacctgaactcctggggggaccgtcagtcttcctcttccccccaaaacccaaggacaccctcatgatctcccggacccctgaggtcacatgcgtggtggtggacgtgagccacgaagaccctgaggtcaagttcaactggtacgtggacggcgtggaggtgcataatgccaagacaaagccgcgggaggagcagtacaacagcacgtaccgggtggtcagcgtcctcaccgtcctgcaccaggactggctgaatggcaaggagtacaagtgcaaggtctccaacaaagccctcccagcccccatcgagaaaaccatctccaaagccaaagggcagccccgagaaccacaggtgtacaccctgcccccatcccgggatgagctgaccaagaaccaggtcagcctgacctgcctggtcaaaggcttctatcccagcgacatcgccgtggagtgggagagcaatgggcagccggagaacaactacaagaccacgcctcccgtgctggactccgacggctccttcttcctctacagcaagctcaccgtggacaagagcaggtggcagcaggggaacgtcttctcatgctccgtgatgcatgaggctctgcacaaccactacacgcagaagagcctctccctgtctccgggtaaa

SEQ ID NO: 2319 - DNA, 837 bp, Artificial Sequence
  Synthetic Polynucleotide
atggaacaacggggacagaacgccccggccgcttcgggggcccggaaaaggcacggcccaggacccagggaggcgcggggagccaggcctgggccccgggtccccaagacccttgtgctcgttgtcgccgcggtcctgctgttggtctcagctgagtctgctctgatcacccaacaagacctagctccccagcagagagcggccccacaacaaaagaggtccagcccctcagagggattgtgtccacctggacaccatatctcagaagacggtagagattgcatctcctgcaaatatggacaggactatagcactcactggaatgacctccttttctgcttgcgctgcaccaggtgtgattcaggtgaagtggagctaagtccctgcaccacgaccagaaacacagtgtgtcagtgcgaagaaggcaccttccgggaagaagattctcctgagatgtgccggaagtgccgcacagggtgtcccagagggatggtcaaggtcggtgattgtacaccctggagtgacatcgaatgtgtccacaaagaatcaggtacaaagcacagtggggaagtcccagctgtggaggagacggtgacctccagcccagggactcctgcctctccctgttctctctcaggcatcatcataggagtcacagttgcagccgtagtcttgattgtggctgtgtttgttcaacgaaggaaatatagatcaaacaaaggagaaagtcctgtggagcctgcagagccttgtcgttacagctgccccagggaggaggagggcagcaccatccccatccaggaggattaccgaaaaccggagcctgcctgctccccc

SEQ ID NO: 2320 - DNA, 816 bp, Artificial Sequence
  Synthetic Polynucleotide
atggaacaacggggacagaacgccccggccgcttcgggggcccggaaaaggcacggcccaggacccagggaggcgcggggagccaggcctgggccccgggtccccaagacccttgtgctcgttgtcgccgcggtcctgctgttggtctcagctgagtctgctctgatcacccaacaagacctagctccccagcagagagcggccccacaacaaaagaggtccagcccctcagagggattgtgtccacctggacaccatatctcagaagacggtagagattgcatctcctgcaaatatggacaggactatagcactcactggaatgacctccttttctgcttgcgctgcaccaggtgtgattcaggtgaagtggagctaagtccctgcaccacgaccagaaacacagtgtgtcagtgcgaagaaggcaccttccgggaagaagattctcctgagatgtgccggaagtgccgcacagggtgtcccagagggatggtcaaggtcggtgattgtacaccctggagtgacatcgaatgtgtccacaaagaatcaggtacaaagcacagtggggaagtcccagctgtggaggagacggtgacctccagcccagggactcctgcctctccctgttctctctcaggcatcatcataggagtcacagttgcagccgtagtcttgattgtggctgtgtttgttaggagtaagaggagcaggctcctgcacagtgactacatgaacatgactccccgccgccccgggcccacccgcaagcattaccagccctatgccccaccacgcgacttcgcagcctatcgctcc

SEQ ID NO: 2321 - DNA, 819 bp, Artificial Sequence
  Synthetic Polynucleotide
atggaacaacggggacagaacgccccggccgcttcgggggcccggaaaaggcacggcccaggacccagggaggcgcggggagccaggcctgggccccgggtccccaagacccttgtgctcgttgtcgccgcggtcctgctgttggtctcagctgagtctgctctgatcacccaacaagacctagctccccagcagagagcggccccacaacaaaagaggtccagcccctcagagggattgtgtccacctggacaccatatctcagaagacggtagagattgcatctcctgcaaatatggacaggactatagcactcactggaatgacctccttttctgcttgcgctgcaccaggtgtgattcaggtgaagtggagctaagtccctgcaccacgaccagaaacacagtgtgtcagtgcgaagaaggcaccttccgggaagaagattctcctgagatgtgccggaagtgccgcacagggtgtcccagagggatggtcaaggtcggtgattgtacaccctggagtgacatcgaatgtgtccacaaagaatcaggtacaaagcacagtggggaagtcccagctgtggaggagacggtgacctccagcccagggactcctgcctctccctgttctctctcaggcatcatcataggagtcacagttgcagccgtagtcttgattgtggctgtgtttgttaaacggggcagaaagaaactcctgtatatattcaaacaaccatttatgagaccagtacaaactactcaagaggaagatggctgtagctgccgatttccagaagaagaagaaggaggatgtgaactg

SEQ ID NO: 2322 - DNA, 804 bp, Artificial Sequence
  Synthetic Polynucleotide
atggaacaacggggacagaacgccccggccgcttcgggggcccggaaaaggcacggcccaggacccagggaggcgcggggagccaggcctgggccccgggtccccaagacccttgtgctcgttgtcgccgcggtcctgctgttggtctcagctgagtctgctctgatcacccaacaagacctagctccccagcagagagcggccccacaacaaaagaggtccagcccctcagagggattgtgtccacctggacaccatatctcagaagacggtagagattgcatctcctgcaaatatggacaggactatagcactcactggaatgacctccttttctgcttgcgctgcaccaggtgtgattcaggtgaagtggagctaagtccctgcaccacgaccagaaacacagtgtgtcagtgcgaagaaggcaccttccgggaagaagattctcctgagatgtgccggaagtgccgcacagggtgtcccagagggatggtcaaggtcggtgattgtacaccctggagtgacatcgaatgtgtccacaaagaatcaggtacaaagcacagtggggaagtcccagctgtggaggagacggtgacctccagcccagggactcctgcctctccctgttctctctcaggcatcatcataggagtcacagttgcagccgtagtcttgattgtggctgtgtttgttcggagggaccagaggctgccccccgatgcccacaagccccctgggggaggcagtttccggacccccatccaagaggagcaggccgacgcccactccaccctggccaagatc

SEQ ID NO: 2323 - DNA, 867 bp, Artificial Sequence
  Synthetic Polynucleotide
atggaacaacggggacagaacgccccggccgcttcgggggcccggaaaaggcacggcccaggacccagggaggcgcggggagccaggcctgggccccgggtccccaagacccttgtgctcgttgtcgccgcggtcctgctgttggtctcagctgagtctgctctgatcacccaacaagacctagctccccagcagagagcggccccacaacaaaagaggtccagcccctcagagggattgtgtccacctggacaccatatctcagaagacggtagagattgcatctcctgcaaatatggacaggactatagcactcactggaatgacctccttttctgcttgcgctgcaccaggtgtgattcaggtgaagtggagctaagtccctgcaccacgaccagaaacacagtgtgtcagtgcgaagaaggcaccttccgggaagaagattctcctgagatgtgccggaagtgccgcacagggtgtcccagagggatggtcaaggtcggtgattgtacaccctggagtgacatcgaatgtgtccacaaagaatcaggtacaaagcacagtggggaagtcccagctgtggaggagacggtgacctccagcccagggactcctgcctctccctgttctctctcaggcatcatcataggagtcacagttgcagccgtagtcttgattgtggctgtgtttgttcagcttggactgcacatctggcagctgaggagtcagtgcatgtggccccgagagacccagctgctgctggaggtgccgccgtcgaccgaagacgccagaagctgccagttccccgaggaagagcggggcgagcgatcggcagaggagaaggggcggctgggagacctgtgggtg

SEQ ID NO: 2324 - DNA, 1014 bp, Artificial Sequence
  Synthetic Polynucleotide
atggaacaacggggacagaacgccccggccgcttcgggggcccggaaaaggcacggcccaggacccagggaggcgcggggagccaggcctgggccccgggtccccaagacccttgtgctcgttgtcgccgcggtcctgctgttggtctcagctgagtctgctctgatcacccaacaagacctagctccccagcagagagcggccccacaacaaaagaggtccagcccctcagagggattgtgtccacctggacaccatatctcagaagacggtagagattgcatctcctgcaaatatggacaggactatagcactcactggaatgacctccttttctgcttgcgctgcaccaggtgtgattcaggtgaagtggagctaagtccctgcaccacgaccagaaacacagtgtgtcagtgcgaagaaggcaccttccgggaagaagattctcctgagatgtgccggaagtgccgcacagggtgtcccagagggatggtcaaggtcggtgattgtacaccctggagtgacatcgaatgtgtccacaaagaatcaggtacaaagcacagtggggaagtcccagctgtggaggagacggtgacctccagcccagggactcctgcctctccctgttctctctcaggcatcatcataggagtcacagttgcagccgtagtcttgattgtggctgtgtttgttcggaagatcaacagcgagcccctgaaggacgagttcaagaataccggctctggcctgctcggcatggctaacatcgacctggaaaagagcagaaccggcgacgagatcatcctgccaaggggccttgagtacaccgtggaagagtgtacctgcgaggactgcatcaagagcaagcccaaggtggacagcgaccactgctttccactgcctgctatggaagagggcgctaccatcctggtcaccaccaagaccaacgactactgcaagagcctgcctgccgctctgtctgccaccgagatcgagaagtctatcagcgccaga

SEQ ID NO: 2325 - DNA, 837 bp, Artificial Sequence
  Synthetic Polynucleotide
atggaacaacggggacagaacgccccggccgcttcgggggcccggaaaaggcacggcccaggacccagggaggcgcggggagccaggcctgggccccgggtccccaagacccttgtgctcgttgtcgccgcggtcctgctgttggtctcagctgagtctgctctgatcacccaacaagacctagctccccagcagagagcggccccacaacaaaagaggtccagcccctcagagggattgtgtccacctggacaccatatctcagaagacggtagagattgcatctcctgcaaatatggacaggactatagcactcactggaatgacctccttttctgcttgcgctgcaccaggtgtgattcaggtgaagtggagctaagtccctgcaccacgaccagaaacacagtgtgtcagtgcgaagaaggcaccttccgggaagaagattctcctgagatgtgccggaagtgccgcacagggtgtcccagagggatggtcaaggtcggtgattgtacaccctggagtgacatcgaatgtgtccacaaagaatcaggtacaaagcacagtggggaagtcccagctgtggaggagacggtgacctccagcccagggactcctgcctctccctgttctatccttgtgatcttctctggaatgttccttgttttcaccctggccggggccctgttcctccatcaacgaaggaaatatagatcaaacaaaggagaaagtcctgtggagcctgcagagccttgtcgttacagctgccccagggaggaggagggcagcaccatccccatccaggaggattaccgaaaaccggagcctgcctgctccccc

SEQ ID NO: 2326 - DNA, 831 bp, Artificial Sequence
  Synthetic Polynucleotide
atggaacaacggggacagaacgccccggccgcttcgggggcccggaaaaggcacggcccaggacccagggaggcgcggggagccaggcctgggccccgggtccccaagacccttgtgctcgttgtcgccgcggtcctgctgttggtctcagctgagtctgctctgatcacccaacaagacctagctccccagcagagagcggccccacaacaaaagaggtccagcccctcagagggattgtgtccacctggacaccatatctcagaagacggtagagattgcatctcctgcaaatatggacaggactatagcactcactggaatgacctccttttctgcttgcgctgcaccaggtgtgattcaggtgaagtggagctaagtccctgcaccacgaccagaaacacagtgtgtcagtgcgaagaaggcaccttccgggaagaagattctcctgagatgtgccggaagtgccgcacagggtgtcccagagggatggtcaaggtcggtgattgtacaccctggagtgacatcgaatgtgtccacaaagaatcaggtacaaagcacagtggggaagtcccagctgtggaggagacggtgacctccagcccagggactcctgcctctccctgttcttgggtgctggtggtggttggtggagtcctggcttgctatagcttgctagtaacagtggcctttattattttctgggtgaggagtaagaggagcaggctcctgcacagtgactacatgaacatgactccccgccgccccgggcccacccgcaagcattaccagccctatgccccaccacgcgacttcgcagcctatcgctcc

SEQ ID NO: 2327 - DNA, 837 bp, Artificial Sequence
  Synthetic Polynucleotide
atggaacaacggggacagaacgccccggccgcttcgggggcccggaaaaggcacggcccaggacccagggaggcgcggggagccaggcctgggccccgggtccccaagacccttgtgctcgttgtcgccgcggtcctgctgttggtctcagctgagtctgctctgatcacccaacaagacctagctccccagcagagagcggccccacaacaaaagaggtccagcccctcagagggattgtgtccacctggacaccatatctcagaagacggtagagattgcatctcctgcaaatatggacaggactatagcactcactggaatgacctccttttctgcttgcgctgcaccaggtgtgattcaggtgaagtggagctaagtccctgcaccacgaccagaaacacagtgtgtcagtgcgaagaaggcaccttccgggaagaagattctcctgagatgtgccggaagtgccgcacagggtgtcccagagggatggtcaaggtcggtgattgtacaccctggagtgacatcgaatgtgtccacaaagaatcaggtacaaagcacagtggggaagtcccagctgtggaggagacggtgacctccagcccagggactcctgcctctccctgttctatcatctccttctttcttgcgctgacgtcgactgcgttgctcttcctgctgttcttcctcacgctccgtttctctgttgttaaacggggcagaaagaaactcctgtatatattcaaacaaccatttatgagaccagtacaaactactcaagaggaagatggctgtagctgccgatttccagaagaagaagaaggaggatgtgaactg

SEQ ID NO: 2328 - DNA, 810 bp, Artificial Sequence
  Synthetic Polynucleotide
atggaacaacggggacagaacgccccggccgcttcgggggcccggaaaaggcacggcccaggacccagggaggcgcggggagccaggcctgggccccgggtccccaagacccttgtgctcgttgtcgccgcggtcctgctgttggtctcagctgagtctgctctgatcacccaacaagacctagctccccagcagagagcggccccacaacaaaagaggtccagcccctcagagggattgtgtccacctggacaccatatctcagaagacggtagagattgcatctcctgcaaatatggacaggactatagcactcactggaatgacctccttttctgcttgcgctgcaccaggtgtgattcaggtgaagtggagctaagtccctgcaccacgaccagaaacacagtgtgtcagtgcgaagaaggcaccttccgggaagaagattctcctgagatgtgccggaagtgccgcacagggtgtcccagagggatggtcaaggtcggtgattgtacaccctggagtgacatcgaatgtgtccacaaagaatcaggtacaaagcacagtggggaagtcccagctgtggaggagacggtgacctccagcccagggactcctgcctctccctgttctatcctgggcctgggcctggtgctggggctgctgggccccctggccatcctgctggccctgtacctgctccggagggaccagaggctgccccccgatgcccacaagccccctgggggaggcagtttccggacccccatccaagaggagcaggccgacgcccactccaccctggccaagatc

SEQ ID NO: 2329 - DNA, 864 bp, Artificial Sequence
  Synthetic Polynucleotide
atggaacaacggggacagaacgccccggccgcttcgggggcccggaaaaggcacggcccaggacccagggaggcgcggggagccaggcctgggccccgggtccccaagacccttgtgctcgttgtcgccgcggtcctgctgttggtctcagctgagtctgctctgatcacccaacaagacctagctccccagcagagagcggccccacaacaaaagaggtccagcccctcagagggattgtgtccacctggacaccatatctcagaagacggtagagattgcatctcctgcaaatatggacaggactatagcactcactggaatgacctccttttctgcttgcgctgcaccaggtgtgattcaggtgaagtggagctaagtccctgcaccacgaccagaaacacagtgtgtcagtgcgaagaaggcaccttccgggaagaagattctcctgagatgtgccggaagtgccgcacagggtgtcccagagggatggtcaaggtcggtgattgtacaccctggagtgacatcgaatgtgtccacaaagaatcaggtacaaagcacagtggggaagtcccagctgtggaggagacggtgacctccagcccagggactcctgcctctccctgttctgggtggctgaccgtcgtcctcctggccgtggccgcctgcgtcctcctcctgacctcggcccagcttggactgcacatctggcagctgaggagtcagtgcatgtggccccgagagacccagctgctgctggaggtgccgccgtcgaccgaagacgccagaagctgccagttccccgaggaagagcggggcgagcgatcggcagaggagaaggggcggctgggagacctgtgggtg

SEQ ID NO: 2330 - DNA, 1020 bp, Artificial Sequence
  Synthetic Polynucleotide
atggaacaacggggacagaacgccccggccgcttcgggggcccggaaaaggcacggcccaggacccagggaggcgcggggagccaggcctgggccccgggtccccaagacccttgtgctcgttgtcgccgcggtcctgctgttggtctcagctgagtctgctctgatcacccaacaagacctagctccccagcagagagcggccccacaacaaaagaggtccagcccctcagagggattgtgtccacctggacaccatatctcagaagacggtagagattgcatctcctgcaaatatggacaggactatagcactcactggaatgacctccttttctgcttgcgctgcaccaggtgtgattcaggtgaagtggagctaagtccctgcaccacgaccagaaacacagtgtgtcagtgcgaagaaggcaccttccgggaagaagattctcctgagatgtgccggaagtgccgcacagggtgtcccagagggatggtcaaggtcggtgattgtacaccctggagtgacatcgaatgtgtccacaaagaatcaggtacaaagcacagtggggaagtcccagctgtggaggagacggtgacctccagcccagggactcctgcctctccctgttctatcctgtggacatgtctgggcctgagcctgattatcagcctggccgtgttcgtgctgatgttcctgctgcggaagatcaacagcgagcccctgaaggacgagttcaagaataccggctctggcctgctcggcatggctaacatcgacctggaaaagagcagaaccggcgacgagatcatcctgccaaggggccttgagtacaccgtggaagagtgtacctgcgaggactgcatcaagagcaagcccaaggtggacagcgaccactgctttccactgcctgctatggaagagggcgctaccatcctggtcaccaccaagaccaacgactactgcaagagcctgcctgccgctctgtctgccaccgagatcgagaagtctatcagcgccaga

SEQ ID NO: 2331 - DNA, 1242 bp, Artificial Sequence
  Synthetic Polynucleotide
atgggacagcacggacccagtgcccgggcccgggcagggcgcgccccaggacccaggccggcgcgggaagccagccctcggctccgggtccacaagaccttcaagtttgtcgtcgtcggggtcctgctgcaggtcgtacctagctcagctgcaaccatcaaacttcatgatcaatcaattggcacacagcaatgggaacatagccctttgggagagttgtgtccaccaggatctcatagatcagaacatcctggagcctgtaaccggtgcacagagggtgtgggttacaccaatgcttccaacaatttgtttgcttgcctcccatgtacagcttgtaaatcagatgaagaagagagaagtccctgcaccacgaccaggaacacagcatgtcagtgcaaaccaggaactttccggaatgacaattctgctgagatgtgccggaagtgcagcagagggtgccccagagggatggtcaaggtcaaggattgtacgccctggagtgacatcgagtgtgtccacaaagaatcaggcaatggacataatgggggcagtggctcttgtgacaaaactcacacatgcccaccgtgcccagcacctgaactcctggggggaccgtcagtcttcctcttccccccaaaacccaaggacaccctcatgatctcccggacccctgaggtcacatgcgtggtggtggacgtgagccacgaagaccctgaggtcaagttcaactggtacgtggacggcgtggaggtgcataatgccaagacaaagccgcgggaggagcagtacaacagcacgtaccgggtggtcagcgtcctcaccgtcctgcaccaggactggctgaatggcaaggagtacaagtgcaaggtctccaacaaagccctcccagcccccatcgagaaaaccatctccaaagccaaagggcagccccgagaaccacaggtgtacaccctgcccccatcccgggatgagctgaccaagaaccaggtcagcctgacctgcctggtcaaaggcttctatcccagcgacatcgccgtggagtgggagagcaatgggcagccggagaacaactacaagaccacgcctcccgtgctggactccgacggctccttcttcctctacagcaagctcaccgtggacaagagcaggtggcagcaggggaacgtcttctcatgctccgtgatgcatgaggctctgcacaaccactacacgcagaagagcctctccctgtctccgggtaaa

SEQ ID NO: 2332 - DNA, 750 bp, Artificial Sequence
  Synthetic Polynucleotide
atgggacagcacggacccagtgcccgggcccgggcagggcgcgccccaggacccaggccggcgcgggaagccagccctcggctccgggtccacaagaccttcaagtttgtcgtcgtcggggtcctgctgcaggtcgtacctagctcagctgcaaccatcaaacttcatgatcaatcaattggcacacagcaatgggaacatagccctttgggagagttgtgtccaccaggatctcatagatcagaacatcctggagcctgtaaccggtgcacagagggtgtgggttacaccaatgcttccaacaatttgtttgcttgcctcccatgtacagcttgtaaatcagatgaagaagagagaagtccctgcaccacgaccaggaacacagcatgtcagtgcaaaccaggaactttccggaatgacaattctgctgagatgtgccggaagtgcagcagagggtgccccagagggatggtcaaggtcaaggattgtacgccctggagtgacatcgagtgtgtccacaaagaatcaggcaatggacataatatccttgtgatcttctctggaatgttccttgttttcaccctggccggggccctgttcctccatcaacgaaggaaatatagatcaaacaaaggagaaagtcctgtggagcctgcagagccttgtcgttacagctgccccagggaggaggagggcagcaccatccccatccaggaggattaccgaaaaccggagcctgcctgctccccc

SEQ ID NO: 2333 - DNA, 744 bp, Artificial Sequence
  Synthetic Polynucleotide
atgggacagcacggacccagtgcccgggcccgggcagggcgcgccccaggacccaggccggcgcgggaagccagccctcggctccgggtccacaagaccttcaagtttgtcgtcgtcggggtcctgctgcaggtcgtacctagctcagctgcaaccatcaaacttcatgatcaatcaattggcacacagcaatgggaacatagccctttgggagagttgtgtccaccaggatctcatagatcagaacatcctggagcctgtaaccggtgcacagagggtgtgggttacaccaatgcttccaacaatttgtttgcttgcctcccatgtacagcttgtaaatcagatgaagaagagagaagtccctgcaccacgaccaggaacacagcatgtcagtgcaaaccaggaactttccggaatgacaattctgctgagatgtgccggaagtgcagcagagggtgccccagagggatggtcaaggtcaaggattgtacgccctggagtgacatcgagtgtgtccacaaagaatcaggcaatggacataattgggtgctggtggtggttggtggagtcctggcttgctatagcttgctagtaacagtggcctttattattttctgggtgaggagtaagaggagcaggctcctgcacagtgactacatgaacatgactccccgccgccccgggcccacccgcaagcattaccagccctatgccccaccacgcgacttcgcagcctatcgctcc

SEQ ID NO: 2334 - DNA, 750 bp, Artificial Sequence
  Synthetic Polynucleotide
atgggacagcacggacccagtgcccgggcccgggcagggcgcgccccaggacccaggccggcgcgggaagccagccctcggctccgggtccacaagaccttcaagtttgtcgtcgtcggggtcctgctgcaggtcgtacctagctcagctgcaaccatcaaacttcatgatcaatcaattggcacacagcaatgggaacatagccctttgggagagttgtgtccaccaggatctcatagatcagaacatcctggagcctgtaaccggtgcacagagggtgtgggttacaccaatgcttccaacaatttgtttgcttgcctcccatgtacagcttgtaaatcagatgaagaagagagaagtccctgcaccacgaccaggaacacagcatgtcagtgcaaaccaggaactttccggaatgacaattctgctgagatgtgccggaagtgcagcagagggtgccccagagggatggtcaaggtcaaggattgtacgccctggagtgacatcgagtgtgtccacaaagaatcaggcaatggacataatatcatctccttctttcttgcgctgacgtcgactgcgttgctcttcctgctgttcttcctcacgctccgtttctctgttgttaaacggggcagaaagaaactcctgtatatattcaaacaaccatttatgagaccagtacaaactactcaagaggaagatggctgtagctgccgatttccagaagaagaagaaggaggatgtgaactg

SEQ ID NO: 2335 - DNA, 723 bp, Artificial Sequence
  Synthetic Polynucleotide
atgggacagcacggacccagtgcccgggcccgggcagggcgcgccccaggacccaggccggcgcgggaagccagccctcggctccgggtccacaagaccttcaagtttgtcgtcgtcggggtcctgctgcaggtcgtacctagctcagctgcaaccatcaaacttcatgatcaatcaattggcacacagcaatgggaacatagccctttgggagagttgtgtccaccaggatctcatagatcagaacatcctggagcctgtaaccggtgcacagagggtgtgggttacaccaatgcttccaacaatttgtttgcttgcctcccatgtacagcttgtaaatcagatgaagaagagagaagtccctgcaccacgaccaggaacacagcatgtcagtgcaaaccaggaactttccggaatgacaattctgctgagatgtgccggaagtgcagcagagggtgccccagagggatggtcaaggtcaaggattgtacgccctggagtgacatcgagtgtgtccacaaagaatcaggcaatggacataatatcctgggcctgggcctggtgctggggctgctgggccccctggccatcctgctggccctgtacctgctccggagggaccagaggctgccccccgatgcccacaagccccctgggggaggcagtttccggacccccatccaagaggagcaggccgacgcccactccaccctggccaagatc

SEQ ID NO: 2336 - DNA, 777 bp, Artificial Sequence
  Synthetic Polynucleotide
atgggacagcacggacccagtgcccgggcccgggcagggcgcgccccaggacccaggccggcgcgggaagccagccctcggctccgggtccacaagaccttcaagtttgtcgtcgtcggggtcctgctgcaggtcgtacctagctcagctgcaaccatcaaacttcatgatcaatcaattggcacacagcaatgggaacatagccctttgggagagttgtgtccaccaggatctcatagatcagaacatcctggagcctgtaaccggtgcacagagggtgtgggttacaccaatgcttccaacaatttgtttgcttgcctcccatgtacagcttgtaaatcagatgaagaagagagaagtccctgcaccacgaccaggaacacagcatgtcagtgcaaaccaggaactttccggaatgacaattctgctgagatgtgccggaagtgcagcagagggtgccccagagggatggtcaaggtcaaggattgtacgccctggagtgacatcgagtgtgtccacaaagaatcaggcaatggacataatgggtggctgaccgtcgtcctcctggccgtggccgcctgcgtcctcctcctgacctcggcccagcttggactgcacatctggcagctgaggagtcagtgcatgtggccccgagagacccagctgctgctggaggtgccgccgtcgaccgaagacgccagaagctgccagttccccgaggaagagcggggcgagcgatcggcagaggagaaggggcggctgggagacctgtgggtg

SEQ ID NO: 2337 - DNA, 933 bp, Artificial Sequence
  Synthetic Polynucleotide
atgggacagcacggacccagtgcccgggcccgggcagggcgcgccccaggacccaggccggcgcgggaagccagccctcggctccgggtccacaagaccttcaagtttgtcgtcgtcggggtcctgctgcaggtcgtacctagctcagctgcaaccatcaaacttcatgatcaatcaattggcacacagcaatgggaacatagccctttgggagagttgtgtccaccaggatctcatagatcagaacatcctggagcctgtaaccggtgcacagagggtgtgggttacaccaatgcttccaacaatttgtttgcttgcctcccatgtacagcttgtaaatcagatgaagaagagagaagtccctgcaccacgaccaggaacacagcatgtcagtgcaaaccaggaactttccggaatgacaattctgctgagatgtgccggaagtgcagcagagggtgccccagagggatggtcaaggtcaaggattgtacgccctggagtgacatcgagtgtgtccacaaagaatcaggcaatggacataatatcctgtggacatgtctgggcctgagcctgattatcagcctggccgtgttcgtgctgatgttcctgctgcggaagatcaacagcgagcccctgaaggacgagttcaagaataccggctctggcctgctcggcatggctaacatcgacctggaaaagagcagaaccggcgacgagatcatcctgccaaggggccttgagtacaccgtggaagagtgtacctgcgaggactgcatcaagagcaagcccaaggtggacagcgaccactgctttccactgcctgctatggaagagggcgctaccatcctggtcaccaccaagaccaacgactactgcaagagcctgcctgccgctctgtctgccaccgagatcgagaagtctatcagcgccaga

SEQ ID NO: 2338 - DNA, 1263 bp, Artificial Sequence
  Synthetic Polynucleotide
atggcccggatccccaagaccctaaagttcgtcgtcgtcatcgtcgcggtcctgctgccagtcctagcttactctgccaccactgcccggcaggaggaagttccccagcagacagtggccccacagcaacagaggcacagcttcaagggggaggagtgtccagcaggatctcatagatcagaacatactggagcctgtaacccgtgcacagagggtgtggattacaccaacgcttccaacaatgaaccttcttgcttcccatgtacagtttgtaaatcagatcaaaaacataaaagttcctgcaccatgaccagagacacagtgtgtcagtgtaaagaaggcaccttccggaatgaaaactccccagagatgtgccggaagtgtagcaggtgccctagtggggaagtccaagtcagtaattgtacgtcctgggatgatatccagtgtgttgaagaatttggtgccaatgccactgtggaaaccccagctgctgaagagacaatgaacaccagcccggggactcctgccccagctgctgaagagacaatgaacaccagcccaggggggggcagtggctcttgtgacaaaactcacacatgcccaccgtgcccagcacctgaactcctggggggaccgtcagtcttcctcttccccccaaaacccaaggacaccctcatgatctcccggacccctgaggtcacatgcgtggtggtggacgtgagccacgaagaccctgaggtcaagttcaactggtacgtggacggcgtggaggtgcataatgccaagacaaagccgcgggaggagcagtacaacagcacgtaccgggtggtcagcgtcctcaccgtcctgcaccaggactggctgaatggcaaggagtacaagtgcaaggtctccaacaaagccctcccagcccccatcgagaaaaccatctccaaagccaaagggcagccccgagaaccacaggtgtacaccctgcccccatcccgggatgagctgaccaagaaccaggtcagcctgacctgcctggtcaaaggcttctatcccagcgacatcgccgtggagtgggagagcaatgggcagccggagaacaactacaagaccacgcctcccgtgctggactccgacggctccttcttcctctacagcaagctcaccgtggacaagagcaggtggcagcaggggaacgtcttctcatgctccgtgatgcatgaggctctgcacaaccactacacgcagaagagcctctccctgtctccgggtaaa

SEQ ID NO: 2339 - DNA, 933 bp, Artificial Sequence
  Synthetic Polynucleotide
atggcccggatccccaagaccctaaagttcgtcgtcgtcatcgtcgcggtcctgctgccagtcctagcttactctgccaccactgcccggcaggaggaagttccccagcagacagtggccccacagcaacagaggcacagcttcaagggggaggagtgtccagcaggatctcatagatcagaacatactggagcctgtaacccgtgcacagagggtgtggattacaccaacgcttccaacaatgaaccttcttgcttcccatgtacagtttgtaaatcagatcaaaaacataaaagttcctgcaccatgaccagagacacagtgtgtcagtgtaaagaaggcaccttccggaatgaaaactccccagagatgtgccggaagtgtagcaggtgccctagtggggaagtccaagtcagtaattgtacgtcctgggatgatatccagtgtgttgaagaatttggtgccaatgccactgtggaaaccccagctgctgaagagacaatgaacaccagcccggggactcctgccccagctgctgaagagacaatgaacaccagcccagggactcctgccccagctgctgaagagacaatgaccaccagcccggggactcctgccccagctgctgaagagacaatgaccaccagcccggggactcctgccccagctgctgaagagacaatgaccaccagcccggggactcctgcctcttctcattacctctcaatccttgtgatcttctctggaatgttccttgttttcaccctggccggggccctgttcctccatcaacgaaggaaatatagatcaaacaaaggagaaagtcctgtggagcctgcagagccttgtcgttacagctgccccagggaggaggagggcagcaccatccccatccaggaggattaccgaaaaccggagcctgcctgctccccc

SEQ ID NO: 2340 - DNA, 927 bp, Artificial Sequence
  Synthetic Polynucleotide
atggcccggatccccaagaccctaaagttcgtcgtcgtcatcgtcgcggtcctgctgccagtcctagcttactctgccaccactgcccggcaggaggaagttccccagcagacagtggccccacagcaacagaggcacagcttcaagggggaggagtgtccagcaggatctcatagatcagaacatactggagcctgtaacccgtgcacagagggtgtggattacaccaacgcttccaacaatgaaccttcttgcttcccatgtacagtttgtaaatcagatcaaaaacataaaagttcctgcaccatgaccagagacacagtgtgtcagtgtaaagaaggcaccttccggaatgaaaactccccagagatgtgccggaagtgtagcaggtgccctagtggggaagtccaagtcagtaattgtacgtcctgggatgatatccagtgtgttgaagaatttggtgccaatgccactgtggaaaccccagctgctgaagagacaatgaacaccagcccggggactcctgccccagctgctgaagagacaatgaacaccagcccagggactcctgccccagctgctgaagagacaatgaccaccagcccggggactcctgccccagctgctgaagagacaatgaccaccagcccggggactcctgccccagctgctgaagagacaatgaccaccagcccggggactcctgcctcttctcattacctctcatgggtgctggtggtggttggtggagtcctggcttgctatagcttgctagtaacagtggcctttattattttctgggtgaggagtaagaggagcaggctcctgcacagtgactacatgaacatgactccccgccgccccgggcccacccgcaagcattaccagccctatgccccaccacgcgacttcgcagcctatcgctcc

SEQ ID NO: 2341 - DNA, 933 bp, Artificial Sequence
  Synthetic Polynucleotide
atggcccggatccccaagaccctaaagttcgtcgtcgtcatcgtcgcggtcctgctgccagtcctagcttactctgccaccactgcccggcaggaggaagttccccagcagacagtggccccacagcaacagaggcacagcttcaagggggaggagtgtccagcaggatctcatagatcagaacatactggagcctgtaacccgtgcacagagggtgtggattacaccaacgcttccaacaatgaaccttcttgcttcccatgtacagtttgtaaatcagatcaaaaacataaaagttcctgcaccatgaccagagacacagtgtgtcagtgtaaagaaggcaccttccggaatgaaaactccccagagatgtgccggaagtgtagcaggtgccctagtggggaagtccaagtcagtaattgtacgtcctgggatgatatccagtgtgttgaagaatttggtgccaatgccactgtggaaaccccagctgctgaagagacaatgaacaccagcccggggactcctgccccagctgctgaagagacaatgaacaccagcccagggactcctgccccagctgctgaagagacaatgaccaccagcccggggactcctgccccagctgctgaagagacaatgaccaccagcccggggactcctgccccagctgctgaagagacaatgaccaccagcccggggactcctgcctcttctcattacctctcaatcatctccttctttcttgcgctgacgtcgactgcgttgctcttcctgctgttcttcctcacgctccgtttctctgttgttaaacggggcagaaagaaactcctgtatatattcaaacaaccatttatgagaccagtacaaactactcaagaggaagatggctgtagctgccgatttccagaagaagaagaaggaggatgtgaactg

SEQ ID NO: 2342 - DNA, 906 bp, Artificial Sequence
  Synthetic Polynucleotide
atggcccggatccccaagaccctaaagttcgtcgtcgtcatcgtcgcggtcctgctgccagtcctagcttactctgccaccactgcccggcaggaggaagttccccagcagacagtggccccacagcaacagaggcacagcttcaagggggaggagtgtccagcaggatctcatagatcagaacatactggagcctgtaacccgtgcacagagggtgtggattacaccaacgcttccaacaatgaaccttcttgcttcccatgtacagtttgtaaatcagatcaaaaacataaaagttcctgcaccatgaccagagacacagtgtgtcagtgtaaagaaggcaccttccggaatgaaaactccccagagatgtgccggaagtgtagcaggtgccctagtggggaagtccaagtcagtaattgtacgtcctgggatgatatccagtgtgttgaagaatttggtgccaatgccactgtggaaaccccagctgctgaagagacaatgaacaccagcccggggactcctgccccagctgctgaagagacaatgaacaccagcccagggactcctgccccagctgctgaagagacaatgaccaccagcccggggactcctgccccagctgctgaagagacaatgaccaccagcccggggactcctgccccagctgctgaagagacaatgaccaccagcccggggactcctgcctcttctcattacctctcaatcctgggcctgggcctggtgctggggctgctgggccccctggccatcctgctggccctgtacctgctccggagggaccagaggctgccccccgatgcccacaagccccctgggggaggcagtttccggacccccatccaagaggagcaggccgacgcccactccaccctggccaagatc

SEQ ID NO: 2343 - DNA, 960 bp, Artificial Sequence
  Synthetic Polynucleotide
atggcccggatccccaagaccctaaagttcgtcgtcgtcatcgtcgcggtcctgctgccagtcctagcttactctgccaccactgcccggcaggaggaagttccccagcagacagtggccccacagcaacagaggcacagcttcaagggggaggagtgtccagcaggatctcatagatcagaacatactggagcctgtaacccgtgcacagagggtgtggattacaccaacgcttccaacaatgaaccttcttgcttcccatgtacagtttgtaaatcagatcaaaaacataaaagttcctgcaccatgaccagagacacagtgtgtcagtgtaaagaaggcaccttccggaatgaaaactccccagagatgtgccggaagtgtagcaggtgccctagtggggaagtccaagtcagtaattgtacgtcctgggatgatatccagtgtgttgaagaatttggtgccaatgccactgtggaaaccccagctgctgaagagacaatgaacaccagcccggggactcctgccccagctgctgaagagacaatgaacaccagcccagggactcctgccccagctgctgaagagacaatgaccaccagcccggggactcctgccccagctgctgaagagacaatgaccaccagcccggggactcctgccccagctgctgaagagacaatgaccaccagcccggggactcctgcctcttctcattacctctcagggtggctgaccgtcgtcctcctggccgtggccgcctgcgtcctcctcctgacctcggcccagcttggactgcacatctggcagctgaggagtcagtgcatgtggccccgagagacccagctgctgctggaggtgccgccgtcgaccgaagacgccagaagctgccagttccccgaggaagagcggggcgagcgatcggcagaggagaaggggcggctgggagacctgtgggtg

SEQ ID NO: 2344 - DNA, 1116 bp, Artificial Sequence
  Synthetic Polynucleotide
atggcccggatccccaagaccctaaagttcgtcgtcgtcatcgtcgcggtcctgctgccagtcctagcttactctgccaccactgcccggcaggaggaagttccccagcagacagtggccccacagcaacagaggcacagcttcaagggggaggagtgtccagcaggatctcatagatcagaacatactggagcctgtaacccgtgcacagagggtgtggattacaccaacgcttccaacaatgaaccttcttgcttcccatgtacagtttgtaaatcagatcaaaaacataaaagttcctgcaccatgaccagagacacagtgtgtcagtgtaaagaaggcaccttccggaatgaaaactccccagagatgtgccggaagtgtagcaggtgccctagtggggaagtccaagtcagtaattgtacgtcctgggatgatatccagtgtgttgaagaatttggtgccaatgccactgtggaaaccccagctgctgaagagacaatgaacaccagcccggggactcctgccccagctgctgaagagacaatgaacaccagcccagggactcctgccccagctgctgaagagacaatgaccaccagcccggggactcctgccccagctgctgaagagacaatgaccaccagcccggggactcctgccccagctgctgaagagacaatgaccaccagcccggggactcctgcctcttctcattacctctcaatcctgtggacatgtctgggcctgagcctgattatcagcctggccgtgttcgtgctgatgttcctgctgcggaagatcaacagcgagcccctgaaggacgagttcaagaataccggctctggcctgctcggcatggctaacatcgacctggaaaagagcagaaccggcgacgagatcatcctgccaaggggccttgagtacaccgtggaagagtgtacctgcgaggactgcatcaagagcaagcccaaggtggacagcgaccactgctttccactgcctgctatggaagagggcgctaccatcctggtcaccaccaagaccaacgactactgcaagagcctgcctgccgctctgtctgccaccgagatcgagaagtctatcagcgccaga

SEQ ID NO: 2345 - DNA, 1335 bp, Artificial Sequence
  Synthetic Polynucleotide
atgggactttggggacaaagcgtcccgaccgcctcgagcgctcgagcagggcgctatccaggagccaggacagcgtcgggaaccagaccatggctcctggaccccaagatccttaagttcgtcgtcttcatcgtcgcggttctgctgccggtccgggttgactctgccaccatcccccggcaggacgaagttccccagcagacagtggccccacagcaacagaggcgcagcctcaaggaggaggagtgtccagcaggatctcatagatcagaatatactggagcctgtaacccgtgcacagagggtgtggattacaccattgcttccaacaatttgccttcttgcctgctatgtacagtttgtaaatcaggtcaaacaaataaaagttcctgtaccacgaccagagacaccgtgtgtcagtgtgaaaaaggaagcttccaggataaaaactcccctgagatgtgccggacgtgtagaacagggtgtcccagagggatggtcaaggtcagtaattgtacgccccggagtgacatcaagtgcaaaaatgaatcagctgccagttccactgggaaaaccccagcagcggaggagacagtgaccaccatcctggggatgcttgcctctccctatcactacgggggcagtggctcttgtgacaaaactcacacatgcccaccgtgcccagcacctgaactcctggggggaccgtcagtcttcctcttccccccaaaacccaaggacaccctcatgatctcccggacccctgaggtcacatgcgtggtggtggacgtgagccacgaagaccctgaggtcaagttcaactggtacgtggacggcgtggaggtgcataatgccaagacaaagccgcgggaggagcagtacaacagcacgtaccgggtggtcagcgtcctcaccgtcctgcaccaggactggctgaatggcaaggagtacaagtgcaaggtctccaacaaagccctcccagcccccatcgagaaaaccatctccaaagccaaagggcagccccgagaaccacaggtgtacaccctgcccccatcccgggatgagctgaccaagaaccaggtcagcctgacctgcctggtcaaaggcttctatcccagcgacatcgccgtggagtgggagagcaatgggcagccggagaacaactacaagaccacgcctcccgtgctggactccgacggctccttcttcctctacagcaagctcaccgtggacaagagcaggtggcagcaggggaacgtcttctcatgctccgtgatgcatgaggctctgcacaaccactacacgcagaagagcctctccctgtctccgggtaaa

SEQ ID NO: 2346 - DNA, 843 bp, Artificial Sequence
  Synthetic Polynucleotide
atgggactttggggacaaagcgtcccgaccgcctcgagcgctcgagcagggcgctatccaggagccaggacagcgtcgggaaccagaccatggctcctggaccccaagatccttaagttcgtcgtcttcatcgtcgcggttctgctgccggtccgggttgactctgccaccatcccccggcaggacgaagttccccagcagacagtggccccacagcaacagaggcgcagcctcaaggaggaggagtgtccagcaggatctcatagatcagaatatactggagcctgtaacccgtgcacagagggtgtggattacaccattgcttccaacaatttgccttcttgcctgctatgtacagtttgtaaatcaggtcaaacaaataaaagttcctgtaccacgaccagagacaccgtgtgtcagtgtgaaaaaggaagcttccaggataaaaactcccctgagatgtgccggacgtgtagaacagggtgtcccagagggatggtcaaggtcagtaattgtacgccccggagtgacatcaagtgcaaaaatgaatcagctgccagttccactgggaaaaccccagcagcggaggagacagtgaccaccatcctggggatgcttgcctctccctatcactacatccttgtgatcttctctggaatgttccttgttttcaccctggccggggccctgttcctccatcaacgaaggaaatatagatcaaacaaaggagaaagtcctgtggagcctgcagagccttgtcgttacagctgccccagggaggaggagggcagcaccatccccatccaggaggattaccgaaaaccggagcctgcctgctccccc

SEQ ID NO: 2347 - DNA, 837 bp, Artificial Sequence
  Synthetic Polynucleotide
atgggactttggggacaaagcgtcccgaccgcctcgagcgctcgagcagggcgctatccaggagccaggacagcgtcgggaaccagaccatggctcctggaccccaagatccttaagttcgtcgtcttcatcgtcgcggttctgctgccggtccgggttgactctgccaccatcccccggcaggacgaagttccccagcagacagtggccccacagcaacagaggcgcagcctcaaggaggaggagtgtccagcaggatctcatagatcagaatatactggagcctgtaacccgtgcacagagggtgtggattacaccattgcttccaacaatttgccttcttgcctgctatgtacagtttgtaaatcaggtcaaacaaataaaagttcctgtaccacgaccagagacaccgtgtgtcagtgtgaaaaaggaagcttccaggataaaaactcccctgagatgtgccggacgtgtagaacagggtgtcccagagggatggtcaaggtcagtaattgtacgccccggagtgacatcaagtgcaaaaatgaatcagctgccagttccactgggaaaaccccagcagcggaggagacagtgaccaccatcctggggatgcttgcctctccctatcactactgggtgctggtggtggttggtggagtcctggcttgctatagcttgctagtaacagtggcctttattattttctgggtgaggagtaagaggagcaggctcctgcacagtgactacatgaacatgactccccgccgccccgggcccacccgcaagcattaccagccctatgccccaccacgcgacttcgcagcctatcgctcc

SEQ ID NO: 2348 - DNA, 843 bp, Artificial Sequence
  Synthetic Polynucleotide
atgggactttggggacaaagcgtcccgaccgcctcgagcgctcgagcagggcgctatccaggagccaggacagcgtcgggaaccagaccatggctcctggaccccaagatccttaagttcgtcgtcttcatcgtcgcggttctgctgccggtccgggttgactctgccaccatcccccggcaggacgaagttccccagcagacagtggccccacagcaacagaggcgcagcctcaaggaggaggagtgtccagcaggatctcatagatcagaatatactggagcctgtaacccgtgcacagagggtgtggattacaccattgcttccaacaatttgccttcttgcctgctatgtacagtttgtaaatcaggtcaaacaaataaaagttcctgtaccacgaccagagacaccgtgtgtcagtgtgaaaaaggaagcttccaggataaaaactcccctgagatgtgccggacgtgtagaacagggtgtcccagagggatggtcaaggtcagtaattgtacgccccggagtgacatcaagtgcaaaaatgaatcagctgccagttccactgggaaaaccccagcagcggaggagacagtgaccaccatcctggggatgcttgcctctccctatcactacatcatctccttctttcttgcgctgacgtcgactgcgttgctcttcctgctgttcttcctcacgctccgtttctctgttgttaaacggggcagaaagaaactcctgtatatattcaaacaaccatttatgagaccagtacaaactactcaagaggaagatggctgtagctgccgatttccagaagaagaagaaggaggatgtgaactg

SEQ ID NO: 2349 - DNA, 816 bp, Artificial Sequence
  Synthetic Polynucleotide
atgggactttggggacaaagcgtcccgaccgcctcgagcgctcgagcagggcgctatccaggagccaggacagcgtcgggaaccagaccatggctcctggaccccaagatccttaagttcgtcgtcttcatcgtcgcggttctgctgccggtccgggttgactctgccaccatcccccggcaggacgaagttccccagcagacagtggccccacagcaacagaggcgcagcctcaaggaggaggagtgtccagcaggatctcatagatcagaatatactggagcctgtaacccgtgcacagagggtgtggattacaccattgcttccaacaatttgccttcttgcctgctatgtacagtttgtaaatcaggtcaaacaaataaaagttcctgtaccacgaccagagacaccgtgtgtcagtgtgaaaaaggaagcttccaggataaaaactcccctgagatgtgccggacgtgtagaacagggtgtcccagagggatggtcaaggtcagtaattgtacgccccggagtgacatcaagtgcaaaaatgaatcagctgccagttccactgggaaaaccccagcagcggaggagacagtgaccaccatcctggggatgcttgcctctccctatcactacatcctgggcctgggcctggtgctggggctgctgggccccctggccatcctgctggccctgtacctgctccggagggaccagaggctgccccccgatgcccacaagccccctgggggaggcagtttccggacccccatccaagaggagcaggccgacgcccactccaccctggccaagatc

SEQ ID NO: 2350 - DNA, 870 bp, Artificial Sequence
  Synthetic Polynucleotide
atgggactttggggacaaagcgtcccgaccgcctcgagcgctcgagcagggcgctatccaggagccaggacagcgtcgggaaccagaccatggctcctggaccccaagatccttaagttcgtcgtcttcatcgtcgcggttctgctgccggtccgggttgactctgccaccatcccccggcaggacgaagttccccagcagacagtggccccacagcaacagaggcgcagcctcaaggaggaggagtgtccagcaggatctcatagatcagaatatactggagcctgtaacccgtgcacagagggtgtggattacaccattgcttccaacaatttgccttcttgcctgctatgtacagtttgtaaatcaggtcaaacaaataaaagttcctgtaccacgaccagagacaccgtgtgtcagtgtgaaaaaggaagcttccaggataaaaactcccctgagatgtgccggacgtgtagaacagggtgtcccagagggatggtcaaggtcagtaattgtacgccccggagtgacatcaagtgcaaaaatgaatcagctgccagttccactgggaaaaccccagcagcggaggagacagtgaccaccatcctggggatgcttgcctctccctatcactacgggtggctgaccgtcgtcctcctggccgtggccgcctgcgtcctcctcctgacctcggcccagcttggactgcacatctggcagctgaggagtcagtgcatgtggccccgagagacccagctgctgctggaggtgccgccgtcgaccgaagacgccagaagctgccagttccccgaggaagagcggggcgagcgatcggcagaggagaaggggcggctgggagacctgtgggtg

SEQ ID NO: 2351 - DNA, 1026 bp, Artificial Sequence
  Synthetic Polynucleotide
atgggactttggggacaaagcgtcccgaccgcctcgagcgctcgagcagggcgctatccaggagccaggacagcgtcgggaaccagaccatggctcctggaccccaagatccttaagttcgtcgtcttcatcgtcgcggttctgctgccggtccgggttgactctgccaccatcccccggcaggacgaagttccccagcagacagtggccccacagcaacagaggcgcagcctcaaggaggaggagtgtccagcaggatctcatagatcagaatatactggagcctgtaacccgtgcacagagggtgtggattacaccattgcttccaacaatttgccttcttgcctgctatgtacagtttgtaaatcaggtcaaacaaataaaagttcctgtaccacgaccagagacaccgtgtgtcagtgtgaaaaaggaagcttccaggataaaaactcccctgagatgtgccggacgtgtagaacagggtgtcccagagggatggtcaaggtcagtaattgtacgccccggagtgacatcaagtgcaaaaatgaatcagctgccagttccactgggaaaaccccagcagcggaggagacagtgaccaccatcctggggatgcttgcctctccctatcactacatcctgtggacatgtctgggcctgagcctgattatcagcctggccgtgttcgtgctgatgttcctgctgcggaagatcaacagcgagcccctgaaggacgagttcaagaataccggctctggcctgctcggcatggctaacatcgacctggaaaagagcagaaccggcgacgagatcatcctgccaaggggccttgagtacaccgtggaagagtgtacctgcgaggactgcatcaagagcaagcccaaggtggacagcgaccactgctttccactgcctgctatggaagagggcgctaccatcctggtcaccaccaagaccaacgactactgcaagagcctgcctgccgctctgtctgccaccgagatcgagaagtctatcagcgccaga

SEQ ID NO: 2352 - DNA, 14 bp, Artificial Sequence
  Synthetic Polynucleotide
  misc_feature (1)..(14): n is a, c, g, or t
nnnnnnnnnnnnnn

SEQ ID NO: 2353 - DNA, 390 bp, Artificial Sequence
  Synthetic Polynucleotide
atggacgacttcgaggcgggggcggcggccggggccgcgcctggggaagaagacctgtgtgcagcatttaacgtcatatgtgataatgtggggaaagattggagaaggctggctcgtcagctcaaagtctcagacaccaagatcgacagcatcgaggacagatacccccgcaacctgacagagcgtgtgcgggagtcactgagaatctggaagaacacagagaaggagaacgcaacagtggcccacctggtgggggctctcaggtcctgccagatgaacctggtggctgacctggtacaagaggttcagcaggcccgtgacctccagaacaggagtggggccatgtccccgatgtcatggaactcagacgcatctacctccgaagcgtcc

SEQ ID NO: 2354 - DNA, 1440 bp, Artificial Sequence
  Synthetic Polynucleotide
atggacttcagcagaaatctttatgatattggggaacaactggacagtgaagatctggcctccctcaagttcctgagcctggactacattccgcaaaggaagcaagaacccatcaaggatgccttgatgttattccagagactccaggaaaagagaatgttggaggaaagcaatctgtccttcctgaaggagctgctcttccgaattaatagactggctttgctgattacctacctaaacactagaaaggaggagatggaaagggaacttcagacaccaggcagggctcaaatttctgcctacagggtcatgctctatcagatttcagaagaagtgagcagatcagaattgaggtcttttaagtttcttttgcaagaggaaatctccaaatgcaaactggatgatgacatgaacctgctggatattttcatagagatggagaagagggtcatcctgggagaaggaaagttggacatcctgaaaagagtctgtgcccaaatcaacaagagcctgctgaagataatcaacgactatgaagaattcagcaaagagagaagcagcagccttgaaggaagtcctgatgaattttcaaatggggaggagttgtgtggggtaatgacaatctcggactctccaagagaacaggatagtgaatcacagactttggacaaagtttaccaaatgaaaagcaaacctcggggatactgtctgatcatcaacaatcacaattttgcaaaagcacgggagaaagtgcccaaacttcacagcattagggacaggaatggaacacacttggatgcaggggctttgaccacgacctttgaagagcttcattttgagatcaagccccacgatgactgcacagtagagcaaatctatgagattttgaaaatctaccaactcatggaccacagtaacatggactgcttcatctgctgtatcctctcccatggagacaagggcatcatctatggcactgatggacaggagccccccatctatgagctgacatctcagttcactggtttgaagtgcccttcccttgctggaaaacccaaagtgttttttattcaggcttgtcagggggataactaccagaaaggtatacctgttgagactgattcagaggagcaaccctatttagaaatggatttatcatcacctcaaacgagatatatcccggatgaggctgactttctgctggggatggccactgtgaataactgtgtttcctaccgaaaccctgcagagggaacctggtacatccagtcactttgccagagcctgagagagcgatgtcctcgaggcgatgatattctcaccatcctgactgaagtgaactatgaagtaagcaacaaggatgacaagaaaaacatggggaaacagatgcctcagcctactttcacactaagaaaaaaacttgtcttcccttctgattga

SEQ ID NO: 2355 - DNA, 1440 bp, Artificial Sequence
  Synthetic Polynucleotide
atggacttcagcagaaatctttatgatattggggaacaactggacagtgaagatctggcctccctcaagttcctgagcctggactacattccgcaaaggaagcaagaacccatcaaggatgccttgatgttattccagagactccaggaaaagagaatgttggaggaaagcaatctgtccttcctgaaggagctgctcttccgaattaatagactggccgccctgattacctacctaaacactagaaaggaggagatggaaagggaacttcagacaccaggcagggctcaaatttctgcctacagggtcatgctctatcagatttcagaagaagtgagcagatcagaattgaggtcttttaagtttcttttgcaagaggaaatctccaaatgcaaactggatgatgacatgaacctgctggatattttcatagagatggagaagagggtcatcctgggagaaggaaagttggacatcctgaaaagagtctgtgcccaaatcaacaagagcctgctgaagataatcaacgactatgaagaattcagcaaagagagaagcagcagccttgaaggaagtcctgatgaattttcaaatggggaggagttgtgtggggtaatgacaatctcggactctccaagagaacaggatagtgaatcacagactttggacaaagtttaccaaatgaaaagcaaacctcggggatactgtctgatcatcaacaatcacaattttgcaaaagcacgggagaaagtgcccaaacttcacagcattagggacaggaatggaacacacttggatgcaggggctttgaccacgacctttgaagagcttcattttgagatcaagccccacgatgactgcacagtagagcaaatctatgagattttgaaaatctaccaactcatggaccacagtaacatggactgcttcatctgctgtatcctctcccatggagacaagggcatcatctatggcactgatggacaggagccccccatctatgagctgacatctcagttcactggtttgaagtgcccttcccttgctggaaaacccaaagtgttttttattcaggcttgtcagggggataactaccagaaaggtatacctgttgagactgattcagaggagcaaccctatttagaaatggatttatcatcacctcaaacgagatatatcccggatgaggctgactttctgctggggatggccactgtgaataactgtgtttcctaccgaaaccctgcagagggaacctggtacatccagtcactttgccagagcctgagagagcgatgtcctcgaggcgatgatattctcaccatcctgactgaagtgaactatgaagtaagcaacaaggatgacaagaaaaacatggggaaacagatgcctcagcctactttcacactaagaaaaaaacttgtcttcccttctgattga

SEQ ID NO: 2356 - DNA, 1440 bp, Artificial Sequence
  Synthetic Polynucleotide
atggacttcagcagaaatctttatgatattggggaacaactggacagtgaagatctggcctccctcaagttcctgagcctggactacattccgcaaaggaagcaagaacccatcaaggatgccttgatgttattccagagactccaggaaaagagaatgttggaggaaagcaatctgtccttcctgaaggagctgctcttccgaattaatagactggccgccgccattacctacctaaacactagaaaggaggagatggaaagggaacttcagacaccaggcagggctcaaatttctgcctacagggtcatgctctatcagatttcagaagaagtgagcagatcagaattgaggtcttttaagtttcttttgcaagaggaaatctccaaatgcaaactggatgatgacatgaacctgctggatattttcatagagatggagaagagggtcatcctgggagaaggaaagttggacatcctgaaaagagtctgtgcccaaatcaacaagagcctgctgaagataatcaacgactatgaagaattcagcaaagagagaagcagcagccttgaaggaagtcctgatgaattttcaaatggggaggagttgtgtggggtaatgacaatctcggactctccaagagaacaggatagtgaatcacagactttggacaaagtttaccaaatgaaaagcaaacctcggggatactgtctgatcatcaacaatcacaattttgcaaaagcacgggagaaagtgcccaaacttcacagcattagggacaggaatggaacacacttggatgcaggggctttgaccacgacctttgaagagcttcattttgagatcaagccccacgatgactgcacagtagagcaaatctatgagattttgaaaatctaccaactcatggaccacagtaacatggactgcttcatctgctgtatcctctcccatggagacaagggcatcatctatggcactgatggacaggagccccccatctatgagctgacatctcagttcactggtttgaagtgcccttcccttgctggaaaacccaaagtgttttttattcaggcttgtcagggggataactaccagaaaggtatacctgttgagactgattcagaggagcaaccctatttagaaatggatttatcatcacctcaaacgagatatatcccggatgaggctgactttctgctggggatggccactgtgaataactgtgtttcctaccgaaaccctgcagagggaacctggtacatccagtcactttgccagagcctgagagagcgatgtcctcgaggcgatgatattctcaccatcctgactgaagtgaactatgaagtaagcaacaaggatgacaagaaaaacatggggaaacagatgcctcagcctactttcacactaagaaaaaaacttgtcttcccttctgattga

SEQ ID NO: 2357 - DNA, 564 bp, Kaposi's sarcoma-associated herpesvirus
atggccacttacgaggttctctgtgaggtggcgcggaaactgggcacggatgacagggaagtggtattgttcctcctaaacgtgttcatacctcaacccacactggcccaattaattggagctcttagagctttaaaggaggagggcaggttaacgtttcccctgttagcggaatgtctgtttcgtgcaggtcgcagagacctcttgcgcgacctgcttcacttagacccgcgttttttagagcgccacctagcgggcacaatgagttatttcagcccttatcagctcactgttctccacgtagacggggagctgtgtgcgagggatattaggtctttgatatttttaagcaaggacactatagggtctcgcagcacaccacagacattcttacactgggtgtactgtatggaaaacttagacctactgggtcccactgacgtggatgccctaatgtcaatgcttagatctttgtcaagagtagacctacagcgccaagtgcaaaccctaatgggccttcacctttccggcccatcacactcccaacactatcgccatacacca

SEQ ID NO: 2358 - DNA, 1257 bp, Artificial Sequence
  Synthetic Polynucleotide
atgaataggcacctctggaagagccaactgtgtgagatggtgcagcccagtggtggcccggcagcagatcaggacgtactgggcgaagagtctcctctggggaagccagccatgctgcacctgccttcagaacagggcgctcctgagaccctccagcgctgcctggaggagaatcaagagctccgagatgccatccggcagagcaaccagattctgcgggagcgctgcgaggagcttctgcatttccaagccagccagagggaggagaaggagttcctcatgtgcaagttccaggaggccaggaaactggtggagagactcggcctggagaagctcgatctgaagaggcagaaggagcaggctctgcgggaggtggagcacctgaagagatgccagcagcagatggctgaggacaaggcctctgtgaaagcccaggtgacgtccttgctcggggagctgcaggagagccagagtcgcttggaggctgccactaaggaatgccaggctctggagggtcgggcccgggcggccagcgagcaggcgcggcagctggagagtgagcgcgaggcgctgcagcagcagcacagcgtgcaggtggaccagctgcgcatgcagggccagagcgtggaggccgcgctccgcatggagcgccaggccgcctcggaggagaagaggaagctggcccagttgcaggtggcctatcaccagctcttccaagaatacgacaaccacatcaagagcagcgtggtgggcagtgagcggaagcgaggaatgcagctggaagatctcaaacagcagctccagcaggccgaggaggccctggtggccgcacaggaggtgatcgataagctgaaggaggaggccgagcagcacaagattgtgatggagaccgttccggtgctgaaggcccaggcggatatctacaaggcggacttccaggctgagaggcaggcccgggagaagctggccgagaagaaggagctcctgcaggagcagctggagcagctgcagagggagtacagcaaactgaaggccagctgtcaggagtcggccaggatcgaggacatgaggaagcggcatgtcgaggtctcccaggcccccttgccccccgcccctgcctacctctcctctcccctggccctgcccagccagaggaggagcccccccgaggagccacctgacttctgctgtcccaagtgccagtatcaggcccctgatatggacaccctgcagatacatgtcatggagtgcattgag

SEQ ID NO: 2359 - DNA, 2268 bp, Artificial Sequence
  Synthetic Polynucleotide
atgagctggtcaccttccctgacaacgcagacatgtggggcctgggaaatgaaagagcgccttgggacagggggatttggaaatgtcatccgatggcacaatcaggaaacaggtgagcagattgccatcaagcagtgccggcaggagctcagcccccggaaccgagagcggtggtgcctggagatccagatcatgagaaggctgacccaccccaatgtggtggctgcccgagatgtccctgaggggatgcagaacttggcgcccaatgacctgcccctgctggccatggagtactgccaaggaggagatctccggaagtacctgaaccagtttgagaactgctgtggtctgcgggaaggtgccatcctcaccttgctgagtgacattgcctctgcgcttagataccttcatgaaaacagaatcatccatcgggatctaaagccagaaaacatcgtcctgcagcaaggagaacagaggttaatacacaaaattattgacctaggatatgccaaggagctggatcagggcgagctttgcacagaattcgtggggaccctgcagtacctggccccagagctactggagcagcagaagtacacagtgaccgtcgactactggagcttcggcaccctggcctttgagtgcatcacgggcttccggcccttcctccccaactggcagcccgtgcagtggcattcaaaagtgcggcagaagagtgaggtggacattgttgttagcgaagacttgaatggaacggtgaagttttcaagctctttaccctaccccaataatcttaacagtgtcctggctgagcgactggagaagtggctgcaactgatgctgatgtggcacccccgacagaggggcacggatcccacgtatgggcccaatggctgcttcaaggccctggatgacatcttaaacttaaagctggttcatatcttgaacatggtcacgggcaccatccacacctaccctgtgacagaggatgagagtctgcagagcttgaaggccagaatccaacaggacacgggcatcccagaggaggaccaggagctgctgcaggaagcgggcctggcgttgatccccgataagcctgccactcagtgtatttcagacggcaagttaaatgagggccacacattggacatggatcttgtttttctctttgacaacagtaaaatcacctatgagactcagatctccccacggccccaacctgaaagtgtcagctgtatccttcaagagcccaagaggaatctcgccttcttccagctgaggaaggtgtggggccaggtctggcacagcatccagaccctgaaggaagattgcaaccggctgcagcagggacagcgagccgccatgatgaatctcctccgaaacaacagctgcctctccaaaatgaagaattccatggcttccatgtctcagcagctcaaggccaagttggatttcttcaaaaccagcatccagattgacctggagaagtacagcgagcaaaccgagtttgggatcacatcagataaactgctgctggcctggagggaaatggagcaggctgtggagctctgtgggcgggagaacgaagtgaaactcctggtagaacggatgatggctctgcagaccgacattgtggacttacagaggagccccatgggccggaagcaggggggaacgctggacgacctagaggagcaagcaagggagctgtacaggagactaagggaaaaacctcgagaccagcgaactgagggtgacagtcaggaaatggtacggctgctgcttcaggcaattcagagcttcgagaagaaagtgcgagtgatctatacgcagctcagtaaaactgtggtttgcaagcagaaggcgctggaactgttgcccaaggtggaagaggtggtgagcttaatgaatgaggatgagaagactgttgtccggctgcaggagaagcggcagaaggagctctggaatctcctgaagattgcttgtagcaaggtccgtggtcctgtcagtggaagcccggatagcatgaatgcctctcgacttagccagcctgggcagctgatgtctcagccctccacggcctccaacagcttacctgagccagccaagaagagtgaagaactggtggctgaagcacataacctctgcaccctgctagaaaatgccatacaggacactgtgagggaacaagaccagagtttcacggccctagactggagctggttacagacggaagaagaagagcacagctgcctggagcaggcctca

SEQ ID NO: 2360 - protein, 259 aa, Homo sapiens
MARIPKTLKFVVVIVAVLLPVLAYSATTARQEEVPQQTVAPQQQRHSFKGEECPAGSHRSEHTGACNPCTEGVDYTNASNNEPSCFPCTVCKSDQKHKSSCTMTRDTVCQCKEGTFRNENSPEMCRKCSRCPSGEVQVSNCTSWDDIQCVEEFGANATVETPAAEETMNTSPGTPAPAAEETMNTSPGTPAPAAEETMTTSPGTPAPAAEETMTTSPGTPAPAAEETMTTSPGTPASSHYLSCTIVGIIVLIVLLIVFV

SEQ ID NO: 2361 - protein, 386 aa, Homo sapiens
MGLWGQSVPTASSARAGRYPGARTASGTRPWLLDPKILKFVVFIVAVLLPVRVDSATIPRQDEVPQQTVAPQQQRRSLKEEECPAGSHRSEYTGACNPCTEGVDYTIASNNLPSCLLCTVCKSGQTNKSSCTTTRDTVCQCEKGSFQDKNSPEMCRTCRTGCPRGMVKVSNCTPRSDIKCKNESAASSTGKTPAAEETVTTILGMLASPYHYLIIIVVLVIILAVVVVGFSCRKKFISYLKGICSGGGGGPERVHRVLFRRRSCPSRVPGAEDNARNETLSNRYLQPTQVSEQEIQGQELAELTGVTVELPEEPQRLLEQAEAEGCQRRRLLVPVNDADSADISTLLDASATLEEGHAKETIQDQLVGSEKLFYEEDEAGSATSCL

SEQ ID NO: 2362 - protein, 440 aa, Homo sapiens
MEQRGQNAPAASGARKRHGPGPREARGARPGPRVPKTLVLVVAAVLLLVSAESALITQQDLAPQQRAAPQQKRSSPSEGLCPPGHHISEDGRDCISCKYGQDYSTHWNDLLFCLRCTRCDSGEVELSPCTTTRNTVCQCEEGTFREEDSPEMCRKCRTGCPRGMVKVGDCTPWSDIECVHKESGTKHSGEVPAVEETVTSSPGTPASPCSLSGIIIGVTVAAVVLIVAVFVCKSLLWKKVLPYLKGICSGGGGDPERVDRSSQRPGAEDNVLNEIVSILQPTQVPEQEMEVQEPAEPTGVNMLSPGESEHLLEPAEAERSQRRRLLVPANEGDPTETLRQCFDDFADLVPFDSWEPLMRKLGLMDNEIKVAKAEAAGHRDTLYTMLIKWVNKTGRDASVHTLLDALETLGERLAKQKIEDHLLSSGKFMYLEGNADSAMS

SEQ ID NO: 2363 - protein, 410 aa, Homo sapiens
MGQHGPSARARAGRAPGPRPAREASPRLRVHKTFKFVVVGVLLQVVPSSAATIKLHDQSIGTQQWEHSPLGELCPPGSHRSEHPGACNRCTEGVGYTNASNNLFACLPCTACKSDEEERSPCTTTRNTACQCKPGTFRNDNSAEMCRKCSRGCPRGMVKVKDCTPWSDIECVHKESGNGHNIWVILVVTLVVPLLLVAVLIVCCCIGSGCGGDPKCMDRVCFWRLGLLRGPGAEDNAHNEILSNADSLSTFVSEQQMESQEPADLTGVTVQSPGEAQCLLGPAEAEGSQRRRLLVPANGADPTETLMLFFDKFANIVPFDSWDQLMRQLDLTKNEIDVVRAGTAGPGDALYAMLMKWVNKTGRNASIHTLLDALERMEERHAREKIQDLLVDSGKFIYLEDGTGSAVSLE

SEQ ID NO: 2364 - protein, 260 aa, Homo sapiens
MARPHPWWLCVLGTLVGLSATPAPKSCPERHYWAQGKLCCQMCEPGTFLVKDCDQHRKAAQCDPCIPGVSFSPDHHTRPHCESCRHCNSGLLVRNCTITANAECACRNGWQCRDKECTECDPLPNPSLTARSSQALSPHPQPTHLPYVSEMLEARTAGHMQTLADFRQLPARTLSTHWPPQRSLCSSDFIRILVIFSGMFLVFTLAGALFLHQRRKYRSNKGESPVEPAEPCRYSCPREEEGSTIPIQEDYRKPEPACSP

SEQ ID NO: 2365 - protein, 220 aa, Homo sapiens
MLRLLLALNLFPSIQVTGNKILVKQSPMLVAYDNAVNLSCKYSYNLFSREFRASLHKGLDSAVEVCVVYGNYSQQLQVYSKTGFNCDGKLGNESVTFYLQNLYVNQTDIYFCKIEVMYPPPYLDNEKSNGTIIHVKGKHLCPSPLFPGPSKPFWVLVVVGGVLACYSLLVTVAFIIFWVRSKRSRLLHSDYMNMTPRRPGPTRKHYQPYAPPRDFAAYRS

SEQ ID NO: 2366 - protein, 255 aa, Homo sapiens
MGNSCYNIVATLLLVLNFERTRSLQDPCSNCPAGTFCDNNRNQICSPCPPNSFSSAGGQRTCDICRQCKGVFRTRKECSSTSNAECDCTPGFHCLGAGCSMCEQDCKQGQELTKKGCKDCCFGTFNDQKRGICRPWTNCSLDGKSVLVNGTKERDVVCGPSPADLSPGASSVTPPAPAREPGHSPQIISFFLALTSTALLFLLFFLTLRFSVVKRGRKKLLYIFKQPFMRPVQTTQEEDGCSCRFPEEEEGGCEL

SEQ ID NO: 2367 - protein, 277 aa, Homo sapiens
MCVGARRLGRGPCAALLLLGLGLSTVTGLHCVGDTYPSNDRCCHECRPGNGMVSRCSRSQNTVCRPCGPGFYNDVVSSKPCKPCTWCNLRSGSERKQLCTATQDTVCRCRAGTQPLDSYKPGVDCAPCPPGHFSPGDNQACKPWTNCTLAGKHTLQPASNSSDAICEDRDPPATQPQETQGPPARPITVQPTEAWPRTSQGPSTRPVEVPGGRAVAAILGLGLVLGLLGPLAILLALYLLRRDQRLPPDAHKPPGGGSFRTPIQEEQADAHSTLAKI

SEQ ID NO: 2368 - protein, 241 aa, Homo sapiens
MAQHGAMGAFRALCGLALLCALSLGQRPTGGPGCGPGRLLLGTGTDARCCRVHTTRCCRDYPGEECCSEWDCMCVQPEFHCGDPCCTTCRHHPCPPGQGVQSQGKFSFGFQCIDCASGTFSGGHEGHCKPWTDCTQFGFLTVFPGNKTHNAVCVPGSPPAEPLGWLTVVLLAVAACVLLLTSAQLGLHIWQLRSQCMWPRETQLLLEVPPSTEDARSCQFPEEERGERSAEEKGRLGDLWV

SEQ ID NO: 2369 - protein, 184 aa, Homo sapiens
MLQMAGQCSQNEYFDSLLHACIPCQLRCSSNTPPLTCQRYCNASVTNSVKGTNAILWTCLGLSLIISLAVFVLMFLLRKINSEPLKDEFKNTGSGLLGMANIDLEKSRTGDEIILPRGLEYTVEECTCEDCIKSKPKVDSDHCFPLPAMEEGATILVTTKTNDYCKSLPAALSATEIEKSISAR

SEQ ID NO: 2370 - protein, 440 aa, Artificial Sequence
  Synthetic Polypeptide
MEQRGQNAPAASGARKRHGPGPREARGARPGPRVPKTLVLVVAAVLLLVSAESALITQQDLAPQQRAAPQQKRSSPSEGLCPPGHHISEDGRDCISCKYGQDYSTHWNDLLFCLRCTRCDSGEVELSPCTTTRNTVCQCEEGTFREEDSPEMCRKCRTGCPRGMVKVGDCTPWSDIECVHKESGTKHSGEVPAVEETVTSSPGTPASPCSLSGIIIGVTVAAVVLIVAVFVCKSLLWKKVLPYLKGICSGGGGDPERVDRSSQRPGAEDNVLNEIVSILQPTQVPEQEMEVQEPAEPTGVNMLSPGESEHLLEPAEAERSQRRRLLVPANEGDPTETLRQCFDDFADLVPFDSWEPLMRKLGNMDNEIKVAKAEAAGHRDTLYTMLIKWVNKTGRDASVHTLLDALETLGERLAKQKIEDHLLSSGKFMYLEGNADSAMS

SEQ ID NO: 2371 - protein, 12 aa, Artificial Sequence
  Synthetic Polypeptide
GGGGGGGGGGGG

SEQ ID NO: 2372 - protein, 25 aa, Artificial Sequence
  Synthetic Polypeptide
MARIPKTLKFVVVIVAVLLPVLAYS

SEQ ID NO: 2373 - protein, 187 aa, Artificial Sequence
  Synthetic Polypeptide
MARIPKTLKFVVVIVAVLLPVLAYSATTARQEEVPQQTVAPQQQRHSFKGEECPAGSHRSEHTGACNPCTEGVDYTNASNNEPSCFPCTVCKSDQKHKSSCTMTRDTVCQCKEGTFRNENSPEMCRKCSRCPSGEVQVSNCTSWDDIQCVEEFGANATVETPAAEETMNTSPGTPAPAAEETMNTSP

SEQ ID NO: 2374 - protein, 259 aa, Artificial Sequence; identical to SEQ ID NO: 2360
  Synthetic Polypeptide

SEQ ID NO: 2375 - protein, 217 aa, Artificial Sequence
  Synthetic Polypeptide
ATTARQEEVPQQTVAPQQQRHSFKGEECPAGSHRSEHTGACNPCTEGVDYTNASNNEPSCFPCTVCKSDQKHKSSCTMTRDTVCQCKEGTFRNENSPEMCRKCSRCPSGEVQVSNCTSWDDIQCVEEFGANATVETPAAEETMNTSPGTPAPAAEETMNTSPGTPAPAAEETMTTSPGTPAPAAEETMTTSPGTPAPAAEETMTTSPGTPASSHYLS

SEQ ID NO: 2376 - protein, 17 aa, Artificial Sequence
  Synthetic Polypeptide
CTIVGIIVLIVLLIVFV

SEQ ID NO: 2377 - protein, 55 aa, Artificial Sequence
  Synthetic Polypeptide
MGLWGQSVPTASSARAGRYPGARTASGTRPWLLDPKILKFVVFIVAVLLPVRVDS

SEQ ID NO: 2378 - protein, 212 aa, Artificial Sequence
  Synthetic Polypeptide
MGLWGQSVPTASSARAGRYPGARTASGTRPWLLDPKILKFVVFIVAVLLPVRVDSATIPRQDEVPQQTVAPQQQRRSLKEEECPAGSHRSEYTGACNPCTEGVDYTIASNNLPSCLLCTVCKSGQTNKSSCTTTRDTVCQCEKGSFQDKNSPEMCRTCRTGCPRGMVKVSNCTPRSDIKCKNESAASSTGKTPAAEETVTTILGMLASPYHY

SEQ ID NO: 2379 - protein, 232 aa, Artificial Sequence
  Synthetic Polypeptide
MGLWGQSVPTASSARAGRYPGARTASGTRPWLLDPKILKFVVFIVAVLLPVRVDSATIPRQDEVPQQTVAPQQQRRSLKEEECPAGSHRSEYTGACNPCTEGVDYTIASNNLPSCLLCTVCKSGQTNKSSCTTTRDTVCQCEKGSFQDKNSPEMCRTCRTGCPRGMVKVSNCTPRSDIKCKNESAASSTGKTPAAEETVTTILGMLASPYHYLIIIVVLVIILAVVVVGFSC

SEQ ID NO: 2380 - protein, 157 aa, Artificial Sequence
  Synthetic Polypeptide
ATIPRQDEVPQQTVAPQQQRRSLKEEECPAGSHRSEYTGACNPCTEGVDYTIASNNLPSCLLCTVCKSGQTNKSSCTTTRDTVCQCEKGSFQDKNSPEMCRTCRTGCPRGMVKVSNCTPRSDIKCKNESAASSTGKTPAAEETVTTILGMLASPYHY

SEQ ID NO: 2381 - protein, 20 aa, Artificial Sequence
  Synthetic Polypeptide
LIIIVVLVIILAVVVVGFSC

SEQ ID NO: 2382 - protein, 154 aa, Artificial Sequence
  Synthetic Polypeptide
RKKFISYLKGICSGGGGGPERVHRVLFRRRSCPSRVPGAEDNARNETLSNRYLQPTQVSEQEIQGQELAELTGVTVELPEEPQRLLEQAEAEGCQRRRLLVPVNDADSADISTLLDASATLEEGHAKETIQDQLVGSEKLFYEEDEAGSATSCL

SEQ ID NO: 2383 - protein, 51 aa, Artificial Sequence
  Synthetic Polypeptide
MGQHGPSARARAGRAPGPRPAREASPRLRVHKTFKFVVVGVLLQVVPSSAA

SEQ ID NO: 2384 - protein, 181 aa, Artificial Sequence
  Synthetic Polypeptide
MGQHGPSARARAGRAPGPRPAREASPRLRVHKTFKFVVVGVLLQVVPSSAATIKLHDQSIGTQQWEHSPLGELCPPGSHRSEHPGACNRCTEGVGYTNASNNLFACLPCTACKSDEEERSPCTTTRNTACQCKPGTFRNDNSAEMCRKCSRGCPRGMVKVKDCTPWSDIECVHKESGNGHN

SEQ ID NO: 2385 - protein, 204 aa, Artificial Sequence
  Synthetic Polypeptide
MGQHGPSARARAGRAPGPRPAREASPRLRVHKTFKFVVVGVLLQVVPSSAATIKLHDQSIGTQQWEHSPLGELCPPGSHRSEHPGACNRCTEGVGYTNASNNLFACLPCTACKSDEEERSPCTTTRNTACQCKPGTFRNDNSAEMCRKCSRGCPRGMVKVKDCTPWSDIECVHKESGNGHNIWVILVVTLVVPLLLVAVLIVCC

SEQ ID NO: 2386 - protein, 130 aa, Artificial Sequence
  Synthetic Polypeptide
TIKLHDQSIGTQQWEHSPLGELCPPGSHRSEHPGACNRCTEGVGYTNASNNLFACLPCTACKSDEEERSPCTTTRNTACQCKPGTFRNDNSAEMCRKCSRGCPRGMVKVKDCTPWSDIECVHKESGNGHN

SEQ ID NO: 2387 - protein, 23 aa, Artificial Sequence
  Synthetic Polypeptide
IWVILVVTLVVPLLLVAVLIVCC

SEQ ID NO: 2388 - protein, 206 aa, Artificial Sequence
  Synthetic Polypeptide
CIGSGCGGDPKCMDRVCFWRLGLLRGPGAEDNAHNEILSNADSLSTFVSEQQMESQEPADLTGVTVQSPGEAQCLLGPAEAEGSQRRRLLVPANGADPTETLMLFFDKFANIVPFDSWDQLMRQLDLTKNEIDVVRAGTAGPGDALYAMLMKWVNKTGRNASIHTLLDALERMEERHAREKIQDLLVDSGKFIYLEDGTGSAVSLE

SEQ ID NO: 2389 - protein, 55 aa, Artificial Sequence
  Synthetic Polypeptide
MEQRGQNAPAASGARKRHGPGPREARGARPGPRVPKTLVLVVAAVLLLVSAESAL

SEQ ID NO: 2390 - protein, 210 aa, Artificial Sequence
  Synthetic Polypeptide
MEQRGQNAPAASGARKRHGPGPREARGARPGPRVPKTLVLVVAAVLLLVSAESALITQQDLAPQQRAAPQQKRSSPSEGLCPPGHHISEDGRDCISCKYGQDYSTHWNDLLFCLRCTRCDSGEVELSPCTTTRNTVCQCEEGTFREEDSPEMCRKCRTGCPRGMVKVGDCTPWSDIECVHKESGTKHSGEVPAVEETVTSSPGTPASPCS

SEQ ID NO: 2391 - protein, 231 aa, Artificial Sequence
  Synthetic Polypeptide
MEQRGQNAPAASGARKRHGPGPREARGARPGPRVPKTLVLVVAAVLLLVSAESALITQQDLAPQQRAAPQQKRSSPSEGLCPPGHHISEDGRDCISCKYGQDYSTHWNDLLFCLRCTRCDSGEVELSPCTTTRNTVCQCEEGTFREEDSPEMCRKCRTGCPRGMVKVGDCTPWSDIECVHKESGTKHSGEVPAVEETVTSSPGTPASPCSLSGIIIGVTVAAVVLIVAVFV

SEQ ID NO: 2392 - protein, 155 aa, Artificial Sequence
  Synthetic Polypeptide
ITQQDLAPQQRAAPQQKRSSPSEGLCPPGHHISEDGRDCISCKYGQDYSTHWNDLLFCLRCTRCDSGEVELSPCTTTRNTVCQCEEGTFREEDSPEMCRKCRTGCPRGMVKVGDCTPWSDIECVHKESGTKHSGEVPAVEETVTSSPGTPASPCS

SEQ ID NO: 2393 - protein, 21 aa, Artificial Sequence
  Synthetic Polypeptide
LSGIIIGVTVAAVVLIVAVFV

SEQ ID NO: 2394 - protein, 209 aa, Artificial Sequence
  Synthetic Polypeptide
CKSLLWKKVLPYLKGICSGGGGDPERVDRSSQRPGAEDNVLNEIVSILQPTQVPEQEMEVQEPAEPTGVNMLSPGESEHLLEPAEAERSQRRRLLVPANEGDPTETLRQCFDDFADLVPFDSWEPLMRKLGLMDNEIKVAKAEAAGHRDTLYTMLIKWVNKTGRDASVHTLLDALETLGERLAKQKIEDHLLSSGKFMYLEGNADSAMS

SEQ ID NO: 2395 - protein, 25 aa, Artificial Sequence
  Synthetic Polypeptide
MAQHGAMGAFRALCGLALLCALSLG

SEQ ID NO: 2396 - protein, 163 aa, Artificial Sequence
  Synthetic Polypeptide
MAQHGAMGAFRALCGLALLCALSLGQRPTGGPGCGPGRLLLGTGTDARCCRVHTTRCCRDYPGEECCSEWDCMCVQPEFHCGDPCCTTCRHHPCPPGQGVQSQGKFSFGFQCIDCASGTFSGGHEGHCKPWTDCTQFGFLTVFPGNKTHNAVCVPGSPPAEPL

SEQ ID NO: 2397 - protein, 138 aa, Artificial Sequence
  Synthetic Polypeptide
QRPTGGPGCGPGRLLLGTGTDARCCRVHTTRCCRDYPGEECCSEWDCMCVQPEFHCGDPCCTTCRHHPCPPGQGVQSQGKFSFGFQCIDCASGTFSGGHEGHCKPWTDCTQFGFLTVFPGNKTHNAVCVPGSPPAEPL

SEQ ID NO: 2398 - protein, 138 aa, Artificial Sequence; identical to SEQ ID NO: 2397
  Synthetic Polypeptide

SEQ ID NO: 2399 - protein, 20 aa, Artificial Sequence
  Synthetic Polypeptide
GWLTVVLLAVAACVLLLTSA

SEQ ID NO: 2400 - protein, 58 aa, Artificial Sequence
  Synthetic Polypeptide
QLGLHIWQLRSQCMWPRETQLLLEVPPSTEDARSCQFPEEERGERSAEEKGRLGDLWV

SEQ ID NO: 2401 - protein, 29 aa, Artificial Sequence
  Synthetic Polypeptide
MCVGARRLGRGPCAALLLLGLGLSTVTGL

SEQ ID NO: 2402 - protein, 217 aa, Artificial Sequence
  Synthetic Polypeptide
MCVGARRLGRGPCAALLLLGLGLSTVTGLHCVGDTYPSNDRCCHECRPGNGMVSRCSRSQNTVCRPCGPGFYNDVVSSKPCKPCTWCNLRSGSERKQLCTATQDTVCRCRAGTQPLDSYKPGVDCAPCPPGHFSPGDNQACKPWTNCTLAGKHTLQPASNSSDAICEDRDPPATQPQETQGPPARPITVQPTEAWPRTSQGPSTRPVEVPGGRAVAA

SEQ ID NO: 2403 - protein, 240 aa, Artificial Sequence
  Synthetic Polypeptide
MCVGARRLGRGPCAALLLLGLGLSTVTGLHCVGDTYPSNDRCCHECRPGNGMVSRCSRSQNTVCRPCGPGFYNDVVSSKPCKPCTWCNLRSGSERKQLCTATQDTVCRCRAGTQPLDSYKPGVDCAPCPPGHFSPGDNQACKPWTNCTLAGKHTLQPASNSSDAICEDRDPPATQPQETQGPPARPITVQPTEAWPRTSQGPSTRPVEVPGGRAVAAILGLGLVLGLLGPLAILLALYLL

SEQ ID NO: 2404 - protein, 188 aa, Artificial Sequence
  Synthetic Polypeptide
HCVGDTYPSNDRCCHECRPGNGMVSRCSRSQNTVCRPCGPGFYNDVVSSKPCKPCTWCNLRSGSERKQLCTATQDTVCRCRAGTQPLDSYKPGVDCAPCPPGHFSPGDNQACKPWTNCTLAGKHTLQPASNSSDAICEDRDPPATQPQETQGPPARPITVQPTEAWPRTSQGPSTRPVEVPGGRAVAA

SEQ ID NO: 2405 - protein, 23 aa, Artificial Sequence
  Synthetic Polypeptide
ILGLGLVLGLLGPLAILLALYLL

SEQ ID NO: 2406 - protein, 37 aa, Artificial Sequence
  Synthetic Polypeptide
RRDQRLPPDAHKPPGGGSFRTPIQEEQADAHSTLAKI

SEQ ID NO: 2407 - protein, 24 aa, Artificial Sequence
  Synthetic Polypeptide
MARPHPWWLCVLGTLVGLSATPAP

SEQ ID NO: 2408 - protein, 191 aa, Artificial Sequence
  Synthetic Polypeptide
MARPHPWWLCVLGTLVGLSATPAPKSCPERHYWAQGKLCCQMCEPGTFLVKDCDQHRKAAQCDPCIPGVSFSPDHHTRPHCESCRHCNSGLLVRNCTITANAECACRNGWQCRDKECTECDPLPNPSLTARSSQALSPHPQPTHLPYVSEMLEARTAGHMQTLADFRQLPARTLSTHWPPQRSLCSSDFIR

SEQ ID NO: 2409 - protein, 212 aa, Artificial Sequence
  Synthetic Polypeptide
MARPHPWWLCVLGTLVGLSATPAPKSCPERHYWAQGKLCCQMCEPGTFLVKDCDQHRKAAQCDPCIPGVSFSPDHHTRPHCESCRHCNSGLLVRNCTITANAECACRNGWQCRDKECTECDPLPNPSLTARSSQALSPHPQPTHLPYVSEMLEARTAGHMQTLADFRQLPARTLSTHWPPQRSLCSSDFIRILVIFSGMFLVFTLAGALFLH

SEQ ID NO: 2410 - protein, 167 aa, Artificial Sequence
  Synthetic Polypeptide
KSCPERHYWAQGKLCCQMCEPGTFLVKDCDQHRKAAQCDPCIPGVSFSPDHHTRPHCESCRHCNSGLLVRNCTITANAECACRNGWQCRDKECTECDPLPNPSLTARSSQALSPHPQPTHLPYVSEMLEARTAGHMQTLADFRQLPARTLSTHWPPQRSLCSSDFIR

SEQ ID NO: 2411 - protein, 21 aa, Artificial Sequence
  Synthetic Polypeptide
ILVIFSGMFLVFTLAGALFLH

SEQ ID NO: 2412 - protein, 48 aa, Artificial Sequence
  Synthetic Polypeptide
QRRKYRSNKGESPVEPAEPCRYSCPREEEGSTIPIQEDYRKPEPACSP

SEQ ID NO: 2413 - protein, 17 aa, Artificial Sequence
  Synthetic Polypeptide
MGNSCYNIVATLLLVLN

SEQ ID NO: 2414 - protein, 186 aa, Artificial Sequence
  Synthetic Polypeptide
MGNSCYNIVATLLLVLNFERTRSLQDPCSNCPAGTFCDNNRNQICSPCPPNSFSSAGGQRTCDICRQCKGVFRTRKECSSTSNAECDCTPGFHCLGAGCSMCEQDCKQGQELTKKGCKDCCFGTFNDQKRGICRPWTNCSLDGKSVLVNGTKERDVVCGPSPADLSPGASSVTPPAPAREPGHSPQ

SEQ ID NO: 2415 - protein, 213 aa, Artificial Sequence
  Synthetic Polypeptide
MGNSCYNIVATLLLVLNFERTRSLQDPCSNCPAGTFCDNNRNQICSPCPPNSFSSAGGQRTCDICRQCKGVFRTRKECSSTSNAECDCTPGFHCLGAGCSMCEQDCKQGQELTKKGCKDCCFGTFNDQKRGICRPWTNCSLDGKSVLVNGTKERDVVCGPSPADLSPGASSVTPPAPAREPGHSPQIISFFLALTSTALLFLLFFLTLRFSVV

SEQ ID NO: 2416 - protein, 169 aa, Artificial Sequence
  Synthetic Polypeptide
FERTRSLQDPCSNCPAGTFCDNNRNQICSPCPPNSFSSAGGQRTCDICRQCKGVFRTRKECSSTSNAECDCTPGFHCLGAGCSMCEQDCKQGQELTKKGCKDCCFGTFNDQKRGICRPWTNCSLDGKSVLVNGTKERDVVCGPSPADLSPGASSVTPPAPAREPGHSPQ

SEQ ID NO: 2417 - protein, 27 aa, Artificial Sequence
  Synthetic Polypeptide
IISFFLALTSTALLFLLFFLTLRFSVV

SEQ ID NO: 2418 - protein, 42 aa, Artificial Sequence; identical to SEQ ID NO: 1857
  Synthetic Polypeptide

SEQ ID NO: 2419 - protein, 18 aa, Artificial Sequence
  Synthetic Polypeptide
MLRLLLALNLFPSIQVTG

SEQ ID NO: 2420 - protein, 153 aa, Artificial Sequence
  Synthetic Polypeptide
MLRLLLALNLFPSIQVTGNKILVKQSPMLVAYDNAVNLSCKYSYNLFSREFRASLHKGLDSAVEVCVVYGNYSQQLQVYSKTGFNCDGKLGNESVTFYLQNLYVNQTDIYFCKIEVMYPPPYLDNEKSNGTIIHVKGKHLCPSPLFPGPSKPF

SEQ ID NO: 2421 - protein, 179 aa, Artificial Sequence
  Synthetic Polypeptide
MLRLLLALNLFPSIQVTGNKILVKQSPMLVAYDNAVNLSCKYSYNLFSREFRASLHKGLDSAVEVCVVYGNYSQQLQVYSKTGFNCDGKLGNESVTFYLQNLYVNQTDIYFCKIEVMYPPPYLDNEKSNGTIIHVKGKHLCPSPLFPGPSKPFWVLVVVGGVLACYSLLVTVAFIIFWV

SEQ ID NO: 2422 - protein, 135 aa, Artificial Sequence
  Synthetic Polypeptide
NKILVKQSPMLVAYDNAVNLSCKYSYNLFSREFRASLHKGLDSAVEVCVVYGNYSQQLQVYSKTGFNCDGKLGNESVTFYLQNLYVNQTDIYFCKIEVMYPPPYLDNEKSNGTIIHVKGKHLCPSPLFPGPSKPF

SEQ ID NO: 2423 - protein, 26 aa, Artificial Sequence
  Synthetic Polypeptide
WVLVVVGGVLACYSLLVTVAFIIFWV

SEQ ID NO: 2424 - protein, 41 aa, Artificial Sequence
  Synthetic Polypeptide
RSKRSRLLHSDYMNMTPRRPGPTRKHYQPYAPPRDFAAYRS

SEQ ID NO: 2425 - protein, 54 aa, Artificial Sequence
  Synthetic Polypeptide
MLQMAGQCSQNEYFDSLLHACIPCQLRCSSNTPPLTCQRYCNASVTNSVKGTNA

SEQ ID NO: 2426 - protein, 23 aa, Artificial Sequence
  Synthetic Polypeptide
ILWTCLGLSLIISLAVFVLMFLL

SEQ ID NO: 2427 - protein, 107 aa, Artificial Sequence
  Synthetic Polypeptide
RKINSEPLKDEFKNTGSGLLGMANIDLEKSRTGDEIILPRGLEYTVEECTCEDCIKSKPKVDSDHCFPLPAMEEGATILVTTKTNDYCKSLPAALSATEIEKSISAR

SEQ ID NO: 2428 - protein, 443 aa, Artificial Sequence
  Synthetic Polypeptide
MEQRGQNAPAASGARKRHGPGPREARGARPGPRVPKTLVLVVAAVLLLVSAESALITQQDLAPQQRAAPQQKRSSPSEGLCPPGHHISEDGRDCISCKYGQDYSTHWNDLLFCLRCTRCDSGEVELSPCTTTRNTVCQCEEGTFREEDSPEMCRKCRTGCPRGMVKVGDCTPWSDIECVHKESGTKHSGEVPAVEETVTSSPGTPASPCSGGSGSCDKTHTCPPCPAPELLGGPSVFLFPPKPKDTLMISRTPEVTCVVVDVSHEDPEVKFNWYVDGVEVHNAKTKPREEQYNSTYRVVSVLTVLHQDWLNGKEYKCKVSNKALPAPIEKTISKAKGQPREPQVYTLPPSRDELTKNQVSLTCLVKGFYPSDIAVEWESNGQPENNYKTTPPVLDSDGSFFLYSKLTVDKSRWQQGNVFSCSVMHEALHNHYTQKSLSLSPGK

SEQ ID NO: 2429 - protein, 279 aa, Artificial Sequence
  Synthetic Polypeptide
MEQRGQNAPAASGARKRHGPGPREARGARPGPRVPKTLVLVVAAVLLLVSAESALITQQDLAPQQRAAPQQKRSSPSEGLCPPGHHISEDGRDCISCKYGQDYSTHWNDLLFCLRCTRCDSGEVELSPCTTTRNTVCQCEEGTFREEDSPEMCRKCRTGCPRGMVKVGDCTPWSDIECVHKESGTKHSGEVPAVEETVTSSPGTPASPCSLSGIIIGVTVAAVVLIVAVFVQRRKYRSNKGESPVEPAEPCRYSCPREEEGSTIPIQEDYRKPEPACSP

SEQ ID NO: 2430 - protein, 272 aa, Artificial Sequence
  Synthetic Polypeptide
MEQRGQNAPAASGARKRHGPGPREARGARPGPRVPKTLVLVVAAVLLLVSAESALITQQDLAPQQRAAPQQKRSSPSEGLCPPGHHISEDGRDCISCKYGQDYSTHWNDLLFCLRCTRCDSGEVELSPCTTTRNTVCQCEEGTFREEDSPEMCRKCRTGCPRGMVKVGDCTPWSDIECVHKESGTKHSGEVPAVEETVTSSPGTPASPCSLSGIIIGVTVAAVVLIVAVFVRSKRSRLLHSDYMNMTPRRPGPTRKHYQPYAPPRDFAAYRS

SEQ ID NO: 2431 - protein, 273 aa, Artificial Sequence
  Synthetic Polypeptide
MEQRGQNAPAASGARKRHGPGPREARGARPGPRVPKTLVLVVAAVLLLVSAESALITQQDLAPQQRAAPQQKRSSPSEGLCPPGHHISEDGRDCISCKYGQDYSTHWNDLLFCLRCTRCDSGEVELSPCTTTRNTVCQCEEGTFREEDSPEMCRKCRTGCPRGMVKVGDCTPWSDIECVHKESGTKHSGEVPAVEETVTSSPGTPASPCSLSGIIIGVTVAAVVLIVAVFVKRGRKKLLYIFKQPFMRPVQTTQEEDGCSCRFPEEEEGGCEL

SEQ ID NO: 2432 - protein, 268 aa, Artificial Sequence
  Synthetic Polypeptide
MEQRGQNAPAASGARKRHGPGPREARGARPGPRVPKTLVLVVAAVLLLVSAESALITQQDLAPQQRAAPQQKRSSPSEGLCPPGHHISEDGRDCISCKYGQDYSTHWNDLLFCLRCTRCDSGEVELSPCTTTRNTVCQCEEGTFREEDSPEMCRKCRTGCPRGMVKVGDCTPWSDIECVHKESGTKHSGEVPAVEETVTSSPGTPASPCSLSGIIIGVTVAAVVLIVAVFVRRDQRLPPDAHKPPGGGSFRTPIQEEQADAHSTLAKI

SEQ ID NO: 2433 - protein, 289 aa, Artificial Sequence
  Synthetic Polypeptide
MEQRGQNAPAASGARKRHGPGPREARGARPGPRVPKTLVLVVAAVLLLVSAESALITQQDLAPQQRAAPQQKRSSPSEGLCPPGHHISEDGRDCISCKYGQDYSTHWNDLLFCLRCTRCDSGEVELSPCTTTRNTVCQCEEGTFREEDSPEMCRKCRTGCPRGMVKVGDCTPWSDIECVHKESGTKHSGEVPAVEETVTSSPGTPASPCSLSGIIIGVTVAAVVLIVAVFVQLGLHIWQLRSQCMWPRETQLLLEVPPSTEDARSCQFPEEERGERSAEEKGRLGDLWV

SEQ ID NO: 2434 - protein, 338 aa, Artificial Sequence
  Synthetic Polypeptide
MEQRGQNAPAASGARKRHGPGPREARGARPGPRVPKTLVLVVAAVLLLVSAESALITQQDLAPQQRAAPQQKRSSPSEGLCPPGHHISEDGRDCISCKYGQDYSTHWNDLLFCLRCTRCDSGEVELSPCTTTRNTVCQCEEGTFREEDSPEMCRKCRTGCPRGMVKVGDCTPWSDIECVHKESGTKHSGEVPAVEETVTSSPGTPASPCSLSGIIIGVTVAAVVLIVAVFVRKINSEPLKDEFKNTGSGLLGMANIDLEKSRTGDEIILPRGLEYTVEECTCEDCIKSKPKVDSDHCFPLPAMEEGATILVTTKTNDYCKSLPAALSATEIEKSISAR

SEQ ID NO: 2435 - protein, 279 aa, Artificial Sequence
  Synthetic Polypeptide
MEQRGQNAPAASGARKRHGPGPREARGARPGPRVPKTLVLVVAAVLLLVSAESALITQQDLAPQQRAAPQQKRSSPSEGLCPPGHHISEDGRDCISCKYGQDYSTHWNDLLFCLRCTRCDSGEVELSPCTTTRNTVCQCEEGTFREEDSPEMCRKCRTGCPRGMVKVGDCTPWSDIECVHKESGTKHSGEVPAVEETVTSSPGTPASPCSILVIFSGMFLVFTLAGALFLHQRRKYRSNKGESPVEPAEPCRYSCPREEEGSTIPIQEDYRKPEPACSP

SEQ ID NO: 2436 - protein, 277 aa, Artificial Sequence
  Synthetic Polypeptide
MEQRGQNAPAASGARKRHGPGPREARGARPGPRVPKTLVLVVAAVLLLVSAESALITQQDLAPQQRAAPQQKRSSPSEGLCPPGHHISEDGRDCISCKYGQDYSTHWNDLLFCLRCTRCDSGEVELSPCTTTRNTVCQCEEGTFREEDSPEMCRKCRTGCPRGMVKVGDCTPWSDIECVHKESGTKHSGEVPAVEETVTSSPGTPASPCSWVLVVVGGVLACYSLLVTVAFIIFWVRSKRSRLLHSDYMNMTPRRPGPTRKHYQPYAPPRDFAAYRS

SEQ ID NO: 2437 - protein, 279 aa, Artificial Sequence
  Synthetic Polypeptide
MEQRGQNAPAASGARKRHGPGPREARGARPGPRVPKTLVLVVAAVLLLVSAESALITQQDLAPQQRAAPQQKRSSPSEGLCPPGHHISEDGRDCISCKYGQDYSTHWNDLLFCLRCTRCDSGEVELSPCTTTRNTVCQCEEGTFREEDSPEMCRKCRTGCPRGMVKVGDCTPWSDIECVHKESGTKHSGEVPAVEETVTSSPGTPASPCSIISFFLALTSTALLFLLFFLTLRFSVVKRGRKKLLYIFKQPFMRPVQTTQEEDGCSCRFPEEEEGGCEL

SEQ ID NO: 2438 - protein, 270 aa, Artificial Sequence
  Synthetic Polypeptide
MEQRGQNAPAASGARKRHGPGPREARGARPGPRVPKTLVLVVAAVLLLVSAESALITQQDLAPQQRAAPQQKRSSPSEGLCPPGHHISEDGRDCISCKYGQDYSTHWNDLLFCLRCTRCDSGEVELSPCTTTRNTVCQCEEGTFREEDSPEMCRKCRTGCPRGMVKVGDCTPWSDIECVHKESGTKHSGEVPAVEETVTSSPGTPASPCSILGLGLVLGLLGPLAILLALYLLRRDQRLPPDAHKPPGGGSFRTPIQEEQADAHSTLAKI

SEQ ID NO: 2439 - protein, 288 aa, Artificial Sequence
  Synthetic Polypeptide
MEQRGQNAPAASGARKRHGPGPREARGARPGPRVPKTLVLVVAAVLLLVSAESALITQQDLAPQQRAAPQQKRSSPSEGLCPPGHHISEDGRDCISCKYGQDYSTHWNDLLFCLRCTRCDSGEVELSPCTTTRNTVCQCEEGTFREEDSPEMCRKCRTGCPRGMVKVGDCTPWSDIECVHKESGTKHSGEVPAVEETVTSSPGTPASPCSGWLTVVLLAVAACVLLLTSAQLGLHIWQLRSQCMWPRETQLLLEVPPSTEDARSCQFPEEERGERSAEEKGRLGDLWV

SEQ ID NO: 2440 - protein, 340 aa, Artificial Sequence
  Synthetic Polypeptide
MEQRGQNAPAASGARKRHGPGPREARGARPGPRVPKTLVLVVAAVLLLVSAESALITQQDLAPQQRAAPQQKRSSPSEGLCPPGHHISEDGRDCISCKYGQDYSTHWNDLLFCLRCTRCDSGEVELSPCTTTRNTVCQCEEGTFREEDSPEMCRKCRTGCPRGMVKVGDCTPWSDIECVHKESGTKHSGEVPAVEETVTSSPGTPASPCSILWTCLGLSLIISLAVFVLMFLLRKINSEPLKDEFKNTGSGLLGMANIDLEKSRTGDEIILPRGLEYTVEECTCEDCIKSKPKVDSDHCFPLPAMEEGATILVTTKTNDYCKSLPAALSATEIEKSISAR

SEQ ID NO: 2441 - protein, 414 aa, Artificial Sequence
  Synthetic Polypeptide
MGQHGPSARARAGRAPGPRPAREASPRLRVHKTFKFVVVGVLLQVVPSSAATIKLHDQSIGTQQWEHSPLGELCPPGSHRSEHPGACNRCTEGVGYTNASNNLFACLPCTACKSDEEERSPCTTTRNTACQCKPGTFRNDNSAEMCRKCSRGCPRGMVKVKDCTPWSDIECVHKESGNGHNGGSGSCDKTHTCPPCPAPELLGGPSVFLFPPKPKDTLMISRTPEVTCVVVDVSHEDPEVKFNWYVDGVEVHNAKTKPREEQYNSTYRVVSVLTVLHQDWLNGKEYKCKVSNKALPAPIEKTISKAKGQPREPQVYTLPPSRDELTKNQVSLTCLVKGFYPSDIAVEWESNGQPENNYKTTPPVLDSDGSFFLYSKLTVDKSRWQQGNVFSCSVMHEALHNHYTQKSLSLSPGK

SEQ ID NO: 2442 - protein, 250 aa, Artificial Sequence
  Synthetic Polypeptide
MGQHGPSARARAGRAPGPRPAREASPRLRVHKTFKFVVVGVLLQVVPSSAATIKLHDQSIGTQQWEHSPLGELCPPGSHRSEHPGACNRCTEGVGYTNASNNLFACLPCTACKSDEEERSPCTTTRNTACQCKPGTFRNDNSAEMCRKCSRGCPRGMVKVKDCTPWSDIECVHKESGNGHNILVIFSGMFLVFTLAGALFLHQRRKYRSNKGESPVEPAEPCRYSCPREEEGSTIPIQEDYRKPEPACSP

SEQ ID NO: 2443 - protein, 248 aa, Artificial Sequence
  Synthetic Polypeptide
MGQHGPSARARAGRAPGPRPAREASPRLRVHKTFKFVVVGVLLQVVPSSAATIKLHDQSIGTQQWEHSPLGELCPPGSHRSEHPGACNRCTEGVGYTNASNNLFACLPCTACKSDEEERSPCTTTRNTACQCKPGTFRNDNSAEMCRKCSRGCPRGMVKVKDCTPWSDIECVHKESGNGHNWVLVVVGGVLACYSLLVTVAFIIFWVRSKRSRLLHSDYMNMTPRRPGPTRKHYQPYAPPRDFAAYRS

SEQ ID NO: 2444 - protein, 250 aa, Artificial Sequence
  Synthetic Polypeptide
MGQHGPSARARAGRAPGPRPAREASPRLRVHKTFKFVVVGVLLQVVPSSAATIKLHDQSIGTQQWEHSPLGELCPPGSHRSEHPGACNRCTEGVGYTNASNNLFACLPCTACKSDEEERSPCTTTRNTACQCKPGTFRNDNSAEMCRKCSRGCPRGMVKVKDCTPWSDIECVHKESGNGHNIISFFLALTSTALLFLLFFLTLRFSVVKRGRKKLLYIFKQPFMRPVQTTQEEDGCSCRFPEEEEGGCEL

SEQ ID NO: 2445 - protein, 241 aa, Artificial Sequence
  Synthetic Polypeptide
MGQHGPSARARAGRAPGPRPAREASPRLRVHKTFKFVVVGVLLQVVPSSAATIKLHDQSIGTQQWEHSPLGELCPPGSHRSEHPGACNRCTEGVGYTNASNNLFACLPCTACKSDEEERSPCTTTRNTACQCKPGTFRNDNSAEMCRKCSRGCPRGMVKVKDCTPWSDIECVHKESGNGHNILGLGLVLGLLGPLAILLALYLLRRDQRLPPDAHKPPGGGSFRTPIQEEQADAHSTLAKI

SEQ ID NO: 2446 - protein, 259 aa, Artificial Sequence
  Synthetic Polypeptide
MGQHGPSARARAGRAPGPRPAREASPRLRVHKTFKFVVVGVLLQVVPSSAATIKLHDQSIGTQQWEHSPLGELCPPGSHRSEHPGACNRCTEGVGYTNASNNLFACLPCTACKSDEEERSPCTTTRNTACQCKPGTFRNDNSAEMCRKCSRGCPRGMVKVKDCTPWSDIECVHKESGNGHNGWLTVVLLAVAACVLLLTSAQLGLHIWQLRSQCMWPRETQLLLEVPPSTEDARSCQFPEEERGERSAEEKGRLGDLWV

SEQ ID NO: 2447 - protein, 311 aa, Artificial Sequence
  Synthetic Polypeptide
MGQHGPSARARAGRAPGPRPAREASPRLRVHKTFKFVVVGVLLQVVPSSAATIKLHDQSIGTQQWEHSPLGELCPPGSHRSEHPGACNRCTEGVGYTNASNNLFACLPCTACKSDEEERSPCTTTRNTACQCKPGTFRNDNSAEMCRKCSRGCPRGMVKVKDCTPWSDIECVHKESGNGHNILWTCLGLSLIISLAVFVLMFLLRKINSEPLKDEFKNTGSGLLGMANIDLEKSRTGDEIILPRGLEYTVEECTCEDCIKSKPKVDSDHCFPLPAMEEGATILVTTKTNDYCKSLPAALSATEIEKSISAR

SEQ ID NO: 2448 - protein, 421 aa, Artificial Sequence
  Synthetic Polypeptide
MARIPKTLKFVVVIVAVLLPVLAYSATTARQEEVPQQTVAPQQQRHSFKGEECPAGSHRSEHTGACNPCTEGVDYTNASNNEPSCFPCTVCKSDQKHKSSCTMTRDTVCQCKEGTFRNENSPEMCRKCSRCPSGEVQVSNCTSWDDIQCVEEFGANATVETPAAEETMNTSPGTPAPAAEETMNTSPGGGSGSCDKTHTCPPCPAPELLGGPSVFLFPPKPKDTLMISRTPEVTCVVVDVSHEDPEVKFNWYVDGVEVHNAKTKPREEQYNSTYRVVSVLTVLHQDWLNGKEYKCKVSNKALPAPIEKTISKAKGQPREPQVYTLPPSRDELTKNQVSLTCLVKGFYPSDIAVEWESNGQPENNYKTTPPVLDSDGSFFLYSKLTVDKSRWQQGNVFSCSVMHEALHNHYTQKSLSLSPGK

SEQ ID NO: 2449 - protein, 311 aa, Artificial Sequence
  Synthetic Polypeptide
MARIPKTLKFVVVIVAVLLPVLAYSATTARQEEVPQQTVAPQQQRHSFKGEECPAGSHRSEHTGACNPCTEGVDYTNASNNEPSCFPCTVCKSDQKHKSSCTMTRDTVCQCKEGTFRNENSPEMCRKCSRCPSGEVQVSNCTSWDDIQCVEEFGANATVETPAAEETMNTSPGTPAPAAEETMNTSPGTPAPAAEETMTTSPGTPAPAAEETMTTSPGTPAPAAEETMTTSPGTPASSHYLSILVIFSGMFLVFTLAGALFLHQRRKYRSNKGESPVEPAEPCRYSCPREEEGSTIPIQEDYRKPEPACSP

SEQ ID NO: 2450 - protein, 309 aa, Artificial Sequence
  Synthetic Polypeptide
MARIPKTLKFVVVIVAVLLPVLAYSATTARQEEVPQQTVAPQQQRHSFKGEECPAGSHRSEHTGACNPCTEGVDYTNASNNEPSCFPCTVCKSDQKHKSSCTMTRDTVCQCKEGTFRNENSPEMCRKCSRCPSGEVQVSNCTSWDDIQCVEEFGANATVETPAAEETMNTSPGTPAPAAEETMNTSPGTPAPAAEETMTTSPGTPAPAAEETMTTSPGTPAPAAEETMTTSPGTPASSHYLSWVLVVVGGVLACYSLLVTVAFIIFWVRSKRSRLLHSDYMNMTPRRPGPTRKHYQPYAPPRDFAAYRS

SEQ ID NO: 2451 - protein, 311 aa, Artificial Sequence
  Synthetic Polypeptide
MARIPKTLKFVVVIVAVLLPVLAYSATTARQEEVPQQTVAPQQQRHSFKGEECPAGSHRSEHTGACNPCTEGVDYTNASNNEPSCFPCTVCKSDQKHKSSCTMTRDTVCQCKEGTFRNENSPEMCRKCSRCPSGEVQVSNCTSWDDIQCVEEFGANATVETPAAEETMNTSPGTPAPAAEETMNTSPGTPAPAAEETMTTSPGTPAPAAEETMTTSPGTPAPAAEETMTTSPGTPASSHYLSIISFFLALTSTALLFLLFFLTLRFSVVKRGRKKLLYIFKQPFMRPVQTTQEEDGCSCRFPEEEEGGCEL

SEQ ID NO: 2452 - protein, 302 aa, Artificial Sequence
  Synthetic Polypeptide
MARIPKTLKFVVVIVAVLLPVLAYSATTARQEEVPQQTVAPQQQRHSFKGEECPAGSHRSEHTGACNPCTEGVDYTNASNNEPSCFPCTVCKSDQKHKSSCTMTRDTVCQCKEGTFRNENSPEMCRKCSRCPSGEVQVSNCTSWDDIQCVEEFGANATVETPAAEETMNTSPGTPAPAAEETMNTSPGTPAPAAEETMTTSPGTPAPAAEETMTTSPGTPAPAAEETMTTSPGTPASSHYLSILGLGLVLGLLGPLAILLALYLLRRDQRLPPDAHKPPGGGSFRTPIQEEQADAHSTLAKI

SEQ ID NO: 2453 - protein, 320 aa, Artificial Sequence
  Synthetic Polypeptide
MARIPKTLKFVVVIVAVLLPVLAYSATTARQEEVPQQTVAPQQQRHSFKGEECPAGSHRSEHTGACNPCTEGVDYTNASNNEPSCFPCTVCKSDQKHKSSCTMTRDTVCQCKEGTFRNENSPEMCRKCSRCPSGEVQVSNCTSWDDIQCVEEFGANATVETPAAEETMNTSPGTPAPAAEETMNTSPGTPAPAAEETMTTSPGTPAPAAEETMTTSPGTPAPAAEETMTTSPGTPASSHYLSGWLTVVLLAVAACVLLLTSAQLGLHIWQLRSQCMWPRETQLLLEVPPSTEDARSCQFPEEERGERSAEEKGRLGDLWV

SEQ ID NO: 2454 - protein, 372 aa, Artificial Sequence
  Synthetic Polypeptide
MARIPKTLKFVVVIVAVLLPVLAYSATTARQEEVPQQTVAPQQQRHSFKGEECPAGSHRSEHTGACNPCTEGVDYTNASNNEPSCFPCTVCKSDQKHKSSCTMTRDTVCQCKEGTFRNENSPEMCRKCSRCPSGEVQVSNCTSWDDIQCVEEFGANATVETPAAEETMNTSPGTPAPAAEETMNTSPGTPAPAAEETMTTSPGTPAPAAEETMTTSPGTPAPAAEETMTTSPGTPASSHYLSILWTCLGLSLIISLAVFVLMFLLRKINSEPLKDEFKNTGSGLLGMANIDLEKSRTGDEIILPRGLEYTVEECTCEDCIKSKPKVDSDHCFPLPAMEEGATILVTTKTNDYCKSLPAALSATEIEKSISAR

SEQ ID NO: 2455 - protein, 445 aa, Artificial Sequence
  Synthetic Polypeptide
MGLWGQSVPTASSARAGRYPGARTASGTRPWLLDPKILKFVVFIVAVLLPVRVDSATIPRQDEVPQQTVAPQQQRRSLKEEECPAGSHRSEYTGACNPCTEGVDYTIASNNLPSCLLCTVCKSGQTNKSSCTTTRDTVCQCEKGSFQDKNSPEMCRTCRTGCPRGMVKVSNCTPRSDIKCKNESAASSTGKTPAAEETVTTILGMLASPYHYGGSGSCDKTHTCPPCPAPELLGGPSVFLFPPKPKDTLMISRTPEVTCVVVDVSHEDPEVKFNWYVDGVEVHNAKTKPREEQYNSTYRVVSVLTVLHQDWLNGKEYKCKVSNKALPAPIEKTISKAKGQPREPQVYTLPPSRDELTKNQVSLTCLVKGFYPSDIAVEWESNGQPENNYKTTPPVLDSDGSFFLYSKLTVDKSRWQQGNVFSCSVMHEALHNHYTQKSLSLSPGK

SEQ ID NO: 2456 - protein, 281 aa, Artificial Sequence
  Synthetic Polypeptide
MGLWGQSVPTASSARAGRYPGARTASGTRPWLLDPKILKFVVFIVAVLLPVRVDSATIPRQDEVPQQTVAPQQQRRSLKEEECPAGSHRSEYTGACNPCTEGVDYTIASNNLPSCLLCTVCKSGQTNKSSCTTTRDTVCQCEKGSFQDKNSPEMCRTCRTGCPRGMVKVSNCTPRSDIKCKNESAASSTGKTPAAEETVTTILGMLASPYHYILVIFSGMFLVFTLAGALFLHQRRKYRSNKGESPVEPAEPCRYSCPREEEGSTIPIQEDYRKPEPACSP

SEQ ID NO: 2457 - protein, 279 aa, Artificial Sequence
  Synthetic Polypeptide
MGLWGQSVPTASSARAGRYPGARTASGTRPWLLDPKILKFVVFIVAVLLPVRVDSATIPRQDEVPQQTVAPQQQRRSLKEEECPAGSHRSEYTGACNPCTEGVDYTIASNNLPSCLLCTVCKSGQTNKSSCTTTRDTVCQCEKGSFQDKNSPEMCRTCRTGCPRGMVKVSNCTPRSDIKCKNESAASSTGKTPAAEETVTTILGMLASPYHYWVLVVVGGVLACYSLLVTVAFIIFWVRSKRSRLLHSDYMNMTPRRPGPTRKHYQPYAPPRDFAAYRS

SEQ ID NO: 2458 - protein, 281 aa, Artificial Sequence
  Synthetic Polypeptide
MGLWGQSVPTASSARAGRYPGARTASGTRPWLLDPKILKFVVFIVAVLLPVRVDSATIPRQDEVPQQTVAPQQQRRSLKEEECPAGSHRSEYTGACNPCTEGVDYTIASNNLPSCLLCTVCKSGQTNKSSCTTTRDTVCQCEKGSFQDKNSPEMCRTCRTGCPRGMVKVSNCTPRSDIKCKNESAASSTGKTPAAEETVTTILGMLASPYHYIISFFLALTSTALLFLLFFLTLRFSVVKRGRKKLLYIFKQPFMRPVQTTQEEDGCSCRFPEEEEGGCEL

SEQ ID NO: 2459 - protein, 272 aa, Artificial Sequence
  Synthetic Polypeptide
MGLWGQSVPTASSARAGRYPGARTASGTRPWLLDPKILKFVVFIVAVLLPVRVDSATIPRQDEVPQQTVAPQQQRRSLKEEECPAGSHRSEYTGACNPCTEGVDYTIASNNLPSCLLCTVCKSGQTNKSSCTTTRDTVCQCEKGSFQDKNSPEMCRTCRTGCPRGMVKVSNCTPRSDIKCKNESAASSTGKTPAAEETVTTILGMLASPYHYILGLGLVLGLLGPLAILLALYLLRRDQRLPPDAHKPPGGGSFRTPIQEEQADAHSTLAKI

SEQ ID NO: 2460 - protein, 290 aa, Artificial Sequence
  Synthetic Polypeptide
MGLWGQSVPTASSARAGRYPGARTASGTRPWLLDPKILKFVVFIVAVLLPVRVDSATIPRQDEVPQQTVAPQQQRRSLKEEECPAGSHRSEYTGACNPCTEGVDYTIASNNLPSCLLCTVCKSGQTNKSSCTTTRDTVCQCEKGSFQDKNSPEMCRTCRTGCPRGMVKVSNCTPRSDIKCKNESAASSTGKTPAAEETVTTILGMLASPYHYGWLTVVLLAVAACVLLLTSAQLGLHIWQLRSQCMWPRETQLLLEVPPSTEDARSCQFPEEERGERSAEEKGRLGDLWV

SEQ ID NO: 2461 - protein, 342 aa, Artificial Sequence
  Synthetic Polypeptide
MGLWGQSVPTASSARAGRYPGARTASGTRPWLLDPKILKFVVFIVAVLLPVRVDSATIPRQDEVPQQTVAPQQQRRSLKEEECPAGSHRSEYTGACNPCTEGVDYTIASNNLPSCLLCTVCKSGQTNKSSCTTTRDTVCQCEKGSFQDKNSPEMCRTCRTGCPRGMVKVSNCTPRSDIKCKNESAASSTGKTPAAEETVTTILGMLASPYHYILWTCLGLSLIISLAVFVLMFLLRKINSEPLKDEFKNTGSGLLGMANIDLEKSRTGDEIILPRGLEYTVEECTCEDCIKSKPKVDSDHCFPLPAMEEGATILVTTKTNDYCKSLPAALSATEIEKSISAR

SEQ ID NO: 2462 - protein, 12 aa, Artificial Sequence
  Synthetic Polypeptide
GGGGGGGGGGGG

SEQ ID NO: 2463 - protein, 130 aa, Artificial Sequence
  Synthetic Polypeptide
MDDFEAGAAAGAAPGEEDLCAAFNVICDNVGKDWRRLARQLKVSDTKIDSIEDRYPRNLTERVRESLRIWKNTEKENATVAHLVGALRSCQMNLVADLVQEVQQARDLQNRSGAMSPMSWNSDASTSEAS

SEQ ID NO: 2464 - protein, 479 aa, Artificial Sequence
  Synthetic Polypeptide
MDFSRNLYDIGEQLDSEDLASLKFLSLDYIPQRKQEPIKDALMLFQRLQEKRMLEESNLSFLKELLFRINRLDALITYLNTRKEEMERELQTPGRAQISAYRVMLYQISEEVSRSELRSFKFLLQEEISKCKLDDDMNLLDIFIEMEKRVILGEGKLDILKRVCAQINKSLLKIINDYEEFSKERSSSLEGSPDEFSNGEELCGVMTISDSPREQDSESQTLDKVYQMKSKPRGYCLIINNHNFAKAREKVPKLHSIRDRNGTHLDAGALTTTFEELHFEIKPHDDCTVEQIYEILKIYQLMDHSNMDCFICCILSHGDKGIIYGTDGQEPPIYELTSQFTGLKCPSLAGKPKVFFIQACQGDNYQKGIPVETDSEEQPYLEMDLSSPQTRYIPDEADFLLGMATVNNCVSYRNPAEGTWYIQSLCQSLRERCPRGDDILTILTEVNYEVSNKDDKKNMGKQMPQPTFTLRKKLVFPSD

SEQ ID NO: 2465 - protein, 479 aa, Artificial Sequence
  Synthetic Polypeptide
MDFSRNLYDIGEQLDSEDLASLKFLSLDYIPQRKQEPIKDALMLFQRLQEKRMLEESNLSFLKELLFRINRLAALITYLNTRKEEMERELQTPGRAQISAYRVMLYQISEEVSRSELRSFKFLLQEEISKCKLDDDMNLLDIFIEMEKRVILGEGKLDILKRVCAQINKSLLKIINDYEEFSKERSSSLEGSPDEFSNGEELCGVMTISDSPREQDSESQTLDKVYQMKSKPRGYCLIINNHNFAKAREKVPKLHSIRDRNGTHLDAGALTTTFEELHFEIKPHDDCTVEQIYEILKIYQLMDHSNMDCFICCILSHGDKGIIYGTDGQEPPIYELTSQFTGLKCPSLAGKPKVFFIQACQGDNYQKGIPVETDSEEQPYLEMDLSSPQTRYIPDEADFLLGMATVNNCVSYRNPAEGTWYIQSLCQSLRERCPRGDDILTILTEVNYEVSNKDDKKNMGKQMPQPTFTLRKKLVFPSD

SEQ ID NO: 2466 - protein, 479 aa, Artificial Sequence
  Synthetic Polypeptide
MDFSRNLYDIGEQLDSEDLASLKFLSLDYIPQRKQEPIKDALMLFQRLQEKRMLEESNLSFLKELLFRINRLAAAITYLNTRKEEMERELQTPGRAQISAYRVMLYQISEEVSRSELRSFKFLLQEEISKCKLDDDMNLLDIFIEMEKRVILGEGKLDILKRVCAQINKSLLKIINDYEEFSKERSSSLEGSPDEFSNGEELCGVMTISDSPREQDSESQTLDKVYQMKSKPRGYCLIINNHNFAKAREKVPKLHSIRDRNGTHLDAGALTTTFEELHFEIKPHDDCTVEQIYEILKIYQLMDHSNMDCFICCILSHGDKGIIYGTDGQEPPIYELTSQFTGLKCPSLAGKPKVFFIQACQGDNYQKGIPVETDSEEQPYLEMDLSSPQTRYIPDEADFLLGMATVNNCVSYRNPAEGTWYIQSLCQSLRERCPRGDDILTILTEVNYEVSNKDDKKNMGKQMPQPTFTLRKKLVFPSD

SEQ ID NO: 2467 - protein, 188 aa, Kaposi's sarcoma-associated herpesvirus
MATYEVLCEVARKLGTDDREVVLFLLNVFIPQPTLAQLIGALRALKEEGRLTFPLLAECLFRAGRRDLLRDLLHLDPRFLERHLAGTMSYFSPYQLTVLHVDGELCARDIRSLIFLSKDTIGSRSTPQTFLHWVYCMENLDLLGPTDVDALMSMLRSLSRVDLQRQVQTLMGLHLSGPSHSQHYRHTP

SEQ ID NO: 2468 - protein, 419 aa, Artificial Sequence
  Synthetic Polypeptide
MNRHLWKSQLCEMVQPSGGPAADQDVLGEESPLGKPAMLHLPSEQGAPETLQRCLEENQELRDAIRQSNQILRERCEELLHFQASQREEKEFLMCKFQEARKLVERLGLEKLDLKRQKEQALREVEHLKRCQQQMAEDKASVKAQVTSLLGELQESQSRLEAATKECQALEGRARAASEQARQLESEREALQQQHSVQVDQLRMQGQSVEAALRMERQAASEEKRKLAQLQVAYHQLFQEYDNHIKSSVVGSERKRGMQLEDLKQQLQQAEEALVAAQEVIDKLKEEAEQHKIVMETVPVLKAQADIYKADFQAERQAREKLAEKKELLQEQLEQLQREYSKLKASCQESARIEDMRKRHVEVSQAPLPPAPAYLSSPLALPSQRRSPPEEPPDFCCPKCQYQAPDMDTLQIHVMECIE

SEQ ID NO: 2469 - protein, 756 aa, Artificial Sequence
  Synthetic Polypeptide
MSWSPSLTTQTCGAWEMKERLGTGGFGNVIRWHNQETGEQIAIKQCRQELSPRNRERWCLEIQIMRRLTHPNVVAARDVPEGMQNLAPNDLPLLAMEYCQGGDLRKYLNQFENCCGLREGAILTLLSDIASALRYLHENRIIHRDLKPENIVLQQGEQRLIHKIIDLGYAKELDQGELCTEFVGTLQYLAPELLEQQKYTVTVDYWSFGTLAFECITGFRPFLPNWQPVQWHSKVRQKSEVDIVVSEDLNGTVKFSSSLPYPNNLNSVLAERLEKWLQLMLMWHPRQRGTDPTYGPNGCFKALDDILNLKLVHILNMVTGTIHTYPVTEDESLQSLKARIQQDTGIPEEDQELLQEAGLALIPDKPATQCISDGKLNEGHTLDMDLVFLFDNSKITYETQISPRPQPESVSCILQEPKRNLAFFQLRKVWGQVWHSIQTLKEDCNRLQQGQRAAMMNLLRNNSCLSKMKNSMASMSQQLKAKLDFFKTSIQIDLEKYSEQTEFGITSDKLLLAWREMEQAVELCGRENEVKLLVERMMALQTDIVDLQRSPMGRKQGGTLDDLEEQARELYRRLREKPRDQRTEGDSQEMVRLLLQAIQSFEKKVRVIYTQLSKTVVCKQKALELLPKVEEVVSLMNEDEKTVVRLQEKRQKELWNLLKIACSKVRGPVSGSPDSMNASRLSQPGQLMSQPSTASNSLPEPAKKSEELVAEAHNLCTLLENAIQDTVREQDQSFTALDWSWLQTEEEEHSCLEQAS

SEQ ID NO: 2470 - DNA, 1563 bp, Artificial Sequence
  Synthetic Polynucleotide
atggccttaccagtgaccgccttgctcctgccgctggccttgctgctccacgccgccaggccggacatccagatgacacagactacatcctccctgtctgcctctctgggagacagagtcaccatcagttgcagggcaagtcaggacattagtaaatatttaaattggtatcagcagaaaccagatggaactgttaaactcctgatctaccatacatcaagattacactcaggagtcccatcaaggttcagtggcagtgggtctggaacagattattctctcaccattagcaacctggagcaagaagatattgccacttacttttgccaacagggtaatacgcttccgtacacgttcggaggggggaccaagctggagatcacaggtggcggtggctcgggcggtggtgggtcgggtggcggcggatctgaggtgaaactgcaggagtcaggacctggcctggtggcgccctcacagagcctgtccgtcacatgcactgtctcaggggtctcattacccgactatggtgtaagctggattcgccagcctccacgaaagggtctggagtggctgggagtaatatggggtagtgaaaccacatactataattcagctctcaaatccagactgaccatcatcaaggacaactccaagagccaagttttcttaaaaatgaacagtctgcaaactgatgacacagccatttactactgtgccaaacattattactacggtggtagctatgctatggactactggggtcaaggaacctcagtcaccgtctcctcacgcgtaacgcgtggaggtggtggctccgacatcaagctccagcagtctggcgctgagcttgctagacctggcgcttccgtgaagatgagctgcaagaccagcggctacaccttcaccagatacaccatgcactgggtcaagcagcggcctggacaaggactggaatggatcggctacatcaaccccagccggggctacaccaactacaaccagaagttcaaggacaaggccacactgaccaccgacaagagcagcagcacagcctacatgcagctgagcagcctgaccagcgaagatagcgccgtgtactactgcgcccggtactacgacgatcactactgcctggattactggggccagggcacaaccctgacagtgtcatctgtggaaggcggctctggtggcagcggaggttctggtggatctggcggagtggatgacatccagctgacacagagccccgccatcatgagtgcttccccaggcgagaaagtgaccatgacctgtagagccagcagcagcgtgtcctacatgaactggtatcagcagaagtccggcacaagccccaagcggtggatctacgataccagcaaagtggcctccggcgtgccctacagattttctggctctggcagcggcaccagctactccctgacaatcagcagcatggaagccgaggatgccgccacctactactgccagcagtggtccagcaatcccctgacatttggagccggcaccaagctggaactgaagcatcaccaccatcaccac

SEQ ID NO: 2471 - DNA, 1563 bp, Artificial Sequence
  Synthetic Polynucleotide
atggccttaccagtgaccgccttgctcctgccgctggccttgctgctccacgccgccaggccggagatcgtgatgacccagagccctgccaccctgtctctgagccctggcgaaagagccaccctgagctgtagagccagccaggacatcagcaagtacctgaactggtatcagcagaagcccggccaggcccccagactgctgatctaccacaccagcagactgcacagcggcatccccgccagattttctggctctggcagcggcaccgactacaccctgacaatcagcagcctccagcccgaggacttcgccgtgtacttctgtcagcaaggcaacaccctgccctacaccttcggccagggcaccaagctggaaatcaagggcggaggcggaagtggaggcggaggatctggcggcggaggctctcaggtgcaactccaggaatctggccctggcctcgtgaagcccagcgagacactgagcctgacctgtaccgtgtccggcgtgtccctgcctgactatggcgtgtcctggatcagacagccccctggcaagggcctggaatggatcggagtgatttggggcagcgaaaccacctactacaacagctccctgaagtccagagtgaccatctccaaggacaactccaagaaccaggtgtccctgaagctgagcagcgtgacagccgccgacaccgccgtgtattactgcgccaagcactactactacggcggcagctacgctatggactactggggccagggaaccctcgtgaccgtgtctagtacgcgtacgcgtggaggtggtggctccgacatcaagctccagcagtctggcgctgagcttgctagacctggcgcttccgtgaagatgagctgcaagaccagcggctacaccttcaccagatacaccatgcactgggtcaagcagcggcctggacaaggactggaatggatcggctacatcaaccccagccggggctacaccaactacaaccagaagttcaaggacaaggccacactgaccaccgacaagagcagcagcacagcctacatgcagctgagcagcctgaccagcgaagatagcgccgtgtactactgcgcccggtactacgacgatcactactgcctggattactggggccagggcacaaccctgacagtgtcatctgtggaaggcggctctggtggcagcggaggttctggtggatctggcggagtggatgacatccagctgacacagagccccgccatcatgagtgcttccccaggcgagaaagtgaccatgacctgtagagccagcagcagcgtgtcctacatgaactggtatcagcagaagtccggcacaagccccaagcggtggatctacgataccagcaaagtggcctccggcgtgccctacagattttctggctctggcagcggcaccagctactccctgacaatcagcagcatggaagccgaggatgccgccacctactactgccagcagtggtccagcaatcccctgacatttggagccggcaccaagctggaactgaagcatcaccaccatcaccac

SEQ ID NO: 2472 - DNA, 1563 bp, Artificial Sequence
  Synthetic Polynucleotide
atggccttaccagtgaccgccttgctcctgccgctggccttgctgctccacgccgccaggccggagatcgtgatgacccagagccctgccaccctgtctctgagccctggcgaaagagccaccctgagctgtagagccagccaggacatcagcaagtacctgaactggtatcagcagaagcccggccaggcccccagactgctgatctaccacaccagcagactgcacagcggcatccccgccagattttctggctctggcagcggcaccgactacaccctgacaatcagcagcctccagcccgaggacttcgccgtgtacttctgtcagcaaggcaacaccctgccctacaccttcggccagggcaccaagctggaaatcaagggcggaggcggaagtggaggcggaggatctggcggcggaggctctcaggtgcaactccaggaatctggccctggcctcgtgaagcccagcgagacactgagcctgacctgtaccgtgtccggcgtgtccctgcctgactatggcgtgtcctggatcagacagccccctggcaagggcctggaatggatcggagtgatttggggcagcgaaaccacctactaccaaagctccctgaagtccagagtgaccatctccaaggacaactccaagaaccaggtgtccctgaagctgagcagcgtgacagccgccgacaccgccgtgtattactgcgccaagcactactactacggcggcagctacgctatggactactggggccagggaaccctcgtgaccgtgtctagtacgcgtacgcgtggaggtggtggctccgacatcaagctccagcagtctggcgctgagcttgctagacctggcgcttccgtgaagatgagctgcaagaccagcggctacaccttcaccagatacaccatgcactgggtcaagcagcggcctggacaaggactggaatggatcggctacatcaaccccagccggggctacaccaactacaaccagaagttcaaggacaaggccacactgaccaccgacaagagcagcagcacagcctacatgcagctgagcagcctgaccagcgaagatagcgccgtgtactactgcgcccggtactacgacgatcactactgcctggattactggggccagggcacaaccctgacagtgtcatctgtggaaggcggctctggtggcagcggaggttctggtggatctggcggagtggatgacatccagctgacacagagccccgccatcatgagtgcttccccaggcgagaaagtgaccatgacctgtagagccagcagcagcgtgtcctacatgaactggtatcagcagaagtccggcacaagccccaagcggtggatctacgataccagcaaagtggcctccggcgtgccctacagattttctggctctggcagcggcaccagctactccctgacaatcagcagcatggaagccgaggatgccgccacctactactgccagcagtggtccagcaatcccctgacatttggagccggcaccaagctggaactgaagcatcaccaccatcaccac

SEQ ID NO: 2473 - DNA, 1566 bp, Artificial Sequence
  Synthetic Polynucleotide
atggccttaccagtgaccgccttgctcctgccgctggccttgctgctccacgccgccaggccggacgagatcgtgctgacacagagccccgccaccctgtcactgtctccaggcgaaagagccaccctgagctgtagcgccagcagcagcgtgtcctacatgcactggtatcagcagaagcccggccaggcccccagactgctgatctacgataccagcaagctggcctccggcatccccgccagattttctggcagcggctccggcaccgacttcaccctgacaatcagcagcctggaacccgaggacgtggccgtgtactactgttttcaaggcagcgtgtaccccttcaccttcggccagggcaccaagctggaaatcaagagaggtggcggtggctcgggcggtggtgggtcgggtggcggcggatctcaggtgcagctccaggaatctggccctggcctcgtgaagcctagccagaccctgagcctgacctgtaccgtgtctggcggcagcatcagcacaagcggcatgggcgtgggctggatcagacagcaccctggcaagggcctggaatggatcggccacatttggtgggacgacgacaagcggtacaaccccgccctgaagtccagagtgaccatcagcgtggacaccagcaagaaccagttcagcctgaagctgagcagcgtgacagccgccgataccgccgtgtattattgcgcccggatggaactgtggtcctactacttcgactactggggccagggaaccctcgtgaccgtgtctagtacgcgtacgcgtggaggtggtggctccgacatcaagctccagcagtctggcgctgagcttgctagacctggcgcttccgtgaagatgagctgcaagaccagcggctacaccttcaccagatacaccatgcactgggtcaagcagcggcctggacaaggactggaatggatcggctacatcaaccccagccggggctacaccaactacaaccagaagttcaaggacaaggccacactgaccaccgacaagagcagcagcacagcctacatgcagctgagcagcctgaccagcgaagatagcgccgtgtactactgcgcccggtactacgacgatcactactgcctggattactggggccagggcacaaccctgacagtgtcatctgtggaaggcggctctggtggcagcggaggttctggtggatctggcggagtggatgacatccagctgacacagagccccgccatcatgagtgcttccccaggcgagaaagtgaccatgacctgtagagccagcagcagcgtgtcctacatgaactggtatcagcagaagtccggcacaagccccaagcggtggatctacgataccagcaaagtggcctccggcgtgccctacagattttctggctctggcagcggcaccagctactccctgacaatcagcagcatggaagccgaggatgccgccacctactactgccagcagtggtccagcaatcccctgacatttggagccggcaccaagctggaactgaagcatcaccaccatcaccac

SEQ ID NO: 2474 - DNA, 1587 bp, Artificial Sequence
  Synthetic Polynucleotide
atggccctgcctgtgacagctctgctgctgcctctggcactgctgctgcacgccgccagacctgacatccagctgacacagagccctgccagcctggccgtgtctctgggacagagagccaccatcagctgcaaggccagccagagcgtggactacgacggcgacagctacctgaactggtatcagcagatccccggccagccccccaagctgctgatctacgatgccagcaacctggtgtccggcatcccccctagattttccggcagcggctccggcaccgacttcaccctgaatatccaccccgtggaaaaggtggacgccgccacctaccactgccagcagagcaccgaagatccctggacctttggcggaggcaccaagctggaaatcaagggaggcggaggaagtggcggcggaggatctgggggaggcggaagccaggtacagctccaacagtcaggggccgagctggtacgcccagggtccagcgtcaaaatatcatgtaaggcatctggctacgccttcagctcttactggatgaattgggtgaaacaacggccaggccagggactggagtggattggtcaaatttggccaggagacggggacacaaattacaacggaaaattcaagggaaaggccacacttaccgccgatgaaagtagttcaaccgcttatatgcagctgtcctccctcgcttctgaggactctgctgtgtacttttgcgcacgccgagaaaccaccactgtgggaagatactactacgctatggattattggggacagggcacaaccgtgaccgttagcagtacgcgtacgcgtggaggtggtggctccgacatcaagctccagcagtctggcgctgagcttgctagacctggcgcttccgtgaagatgagctgcaagaccagcggctacaccttcaccagatacaccatgcactgggtcaagcagcggcctggacaaggactggaatggatcggctacatcaaccccagccggggctacaccaactacaaccagaagttcaaggacaaggccacactgaccaccgacaagagcagcagcacagcctacatgcagctgagcagcctgaccagcgaagatagcgccgtgtactactgcgcccggtactacgacgatcactactgcctggattactggggccagggcacaaccctgacagtgtcatctgtggaaggcggctctggtggcagcggaggttctggtggatctggcggagtggatgacatccagctgacacagagccccgccatcatgagtgcttccccaggcgagaaagtgaccatgacctgtagagccagcagcagcgtgtcctacatgaactggtatcagcagaagtccggcacaagccccaagcggtggatctacgataccagcaaagtggcctccggcgtgccctacagattttctggctctggcagcggcaccagctactccctgacaatcagcagcatggaagccgaggatgccgccacctactactgccagcagtggtccagcaatcccctgacatttggagccggcaccaagctggaactgaagcatcaccaccatcaccac

SEQ ID NO: 2475 - DNA, 1638 bp, Artificial Sequence
  Synthetic Polynucleotide
atggccttaccagtgaccgccttgctcctgccgctggccttgctgctccacgccgccaggccgatcaacatctacaacgccgagcctgccaatcctagcgagaagaacagccccgaattcgacatcgtgatgacacagagccccgccacactgtcactgtctccaggcgaaagagccacactgagctgtcggagcagcaagagcctccagaacgtgaacggcaacacctacctgtactggttccagcagaagcccggccagtctcctcagctcctgatctacagaatgagcaacctgaacagcggcgtgcccgacagattttctggcagcggaagcggcaccgagttcaccctgaccataagcagcctggaacctgaggacttcgccgtgtactactgtatgcagcacctggaataccccatcaccttcggagccggcaccaagctggaaatcaaaggcggaggcggaagtggaggcggaggatctggcggcggaggctctgaagtgcaactggttgaatctggcggcggactggttaagcctggcggatctctgaagctgagctgtgccgccagcggctacacctttaccagctacgtgatgcactgggtccgacaggcccctggcaaaggacttgagtggatcggctacatcaacccctacaacgatggcaccaagtacaacgagaagttccagggcagagtgaccatcagctccgacaagagcatcagcaccgcctacatggaactgagcagcctgagaagcgaggataccgccatgtactattgcgccagaggcacctactactacggcaccagagtgttcgactactggggccagggaaccctggtcacagtctcttctacgcgtacgcgtggaggtggtggctccgacatcaagctccagcagtctggcgctgagcttgctagacctggcgcttccgtgaagatgagctgcaagaccagcggctacaccttcaccagatacaccatgcactgggtcaagcagcggcctggacaaggactggaatggatcggctacatcaaccccagccggggctacaccaactacaaccagaagttcaaggacaaggccacactgaccaccgacaagagcagcagcacagcctacatgcagctgagcagcctgaccagcgaagatagcgccgtgtactactgcgcccggtactacgacgatcactactgcctggattactggggccagggcacaaccctgacagtgtcatctgtggaaggcggctctggtggcagcggaggttctggtggatctggcggagtggatgacatccagctgacacagagccccgccatcatgagtgcttccccaggcgagaaagtgaccatgacctgtagagccagcagcagcgtgtcctacatgaactggtatcagcagaagtccggcacaagccccaagcggtggatctacgataccagcaaagtggcctccggcgtgccctacagattttctggctctggcagcggcaccagctactccctgacaatcagcagcatggaagccgaggatgccgccacctactactgccagcagtggtccagcaatcccctgacatttggagccggcaccaagctggaactgaagcatcaccaccatcaccac

SEQ ID NO: 2476 - DNA, 1569 bp, Artificial Sequence
  Synthetic Polynucleotide
atggccttaccagtgaccgccttgctcctgccgctggccttgctgctccacgccgccaggccggacatccagatgacacagagccctagcagcctgtctgccagcgtgggagacagagtgaccatcacatgcaaggccagcgaccacatcaacaactggctggcctggtatcagcagaagcctggacaggcccctaagctgctgatctacggcgctaccacactggaaacaggcgtgcccagcagattttctggcagcggctctggcaccgactacaccctgacaatatccagcctccagcctgaggacttcgccacctactactgtcagcagagctggaacaccccttggacattcggccagggcaccaagctggaaatcaagagaggcggaggcggaagtggaggcggaggatctggcggcggaggctctcaagttcagcttcaacagcctggcgctgagctggtcaaacctggcgcttctgtgaagatgagctgcaaagccagcggctacgccttcagcagctactggatcaactggatgaagcagaaacccggccagggactcgaatggatcggccaaatctatcccggcgacggcgacaccaactacaacggcaagttcaagggcagagccacactgaccgccgatacctctagcagcacagcctacatgcagctgagcagcctgaccagcgaagatagcgccgtgtacttctgtgcccggtccatcacaacagtcgtgggctgcgctatggactattggggccagggaacaagcgtgaccgtgtctagtacgcgtacgcgtggaggtggtggctccgacatcaagctccagcagtctggcgctgagcttgctagacctggcgcttccgtgaagatgagctgcaagaccagcggctacaccttcaccagatacaccatgcactgggtcaagcagcggcctggacaaggactggaatggatcggctacatcaaccccagccggggctacaccaactacaaccagaagttcaaggacaaggccacactgaccaccgacaagagcagcagcacagcctacatgcagctgagcagcctgaccagcgaagatagcgccgtgtactactgcgcccggtactacgacgatcactactgcctggattactggggccagggcacaaccctgacagtgtcatctgtggaaggcggctctggtggcagcggaggttctggtggatctggcggagtggatgacatccagctgacacagagccccgccatcatgagtgcttccccaggcgagaaagtgaccatgacctgtagagccagcagcagcgtgtcctacatgaactggtatcagcagaagtccggcacaagccccaagcggtggatctacgataccagcaaagtggcctccggcgtgccctacagattttctggctctggcagcggcaccagctactccctgacaatcagcagcatggaagccgaggatgccgccacctactactgccagcagtggtccagcaatcccctgacatttggagccggcaccaagctggaactgaagcatcaccaccatcaccac

SEQ ID NO: 2477 - DNA, 1569 bp, Artificial Sequence
  Synthetic Polynucleotide
atggccttaccagtgaccgccttgctcctgccgctggccttgctgctccacgccgccaggccggacatccagatgacccagagccctagctcactgagcgccagcgtgggcgacagggtgaccattacctgctccgccagccaggacatcagcaactacctgaactggtaccagcagaagcccggcaaggcccccaagctgctgatctactacacctccaacctgcactccggcgtgcccagcaggttcagcggaagcggcagcggcaccgatttcaccctgaccatctccagcctgcagcccgaggacttcgccacctactactgccagcagtacaggaagctcccctggactttcggccagggcaccaaactggagatcaagcgtggcggaggcggaagtggaggcggaggatctggcggcggaggctctcaggtgcagctggtccagagcggcgccgaagtgaagaagcccggcagctccgtgaaagtgagctgcaaggccagcggcggcaccttcagcaactactggatgcactgggtgaggcaggcccccggacagggcctggagtggatgggcgccacctacaggggccacagcgacacctactacaaccagaagttcaagggccgggtgaccatcaccgccgacaagagcaccagcaccgcctacatggaactgagcagcctcaggagcgaggacaccgctgtgtattactgcgccaggggcgccatctacgacggctacgacgtgctggacaactggggccagggcacactggtgaccgtgtccagcacgcgtacgcgtggaggtggtggctccgacatcaagctccagcagtctggcgctgagcttgctagacctggcgcttccgtgaagatgagctgcaagaccagcggctacaccttcaccagatacaccatgcactgggtcaagcagcggcctggacaaggactggaatggatcggctacatcaaccccagccggggctacaccaactacaaccagaagttcaaggacaaggccacactgaccaccgacaagagcagcagcacagcctacatgcagctgagcagcctgaccagcgaagatagcgccgtgtactactgcgcccggtactacgacgatcactactgcctggattactggggccagggcacaaccctgacagtgtcatctgtggaaggcggctctggtggcagcggaggttctggtggatctggcggagtggatgacatccagctgacacagagccccgccatcatgagtgcttccccaggcgagaaagtgaccatgacctgtagagccagcagcagcgtgtcctacatgaactggtatcagcagaagtccggcacaagccccaagcggtggatctacgataccagcaaagtggcctccggcgtgccctacagattttctggctctggcagcggcaccagctactccctgacaatcagcagcatggaagccgaggatgccgccacctactactgccagcagtggtccagcaatcccctgacatttggagccggcaccaagctggaactgaagcatcaccaccatcaccac

SEQ ID NO: 2478 - DNA, 1569 bp, Artificial Sequence
  Synthetic Polynucleotide
atggccttaccagtgaccgccttgctcctgccgctggccttgctgctccacgccgccaggccggacatcgtgctgacacagagccctgccaccctgtctctgagccctggcgatagagccaccatcagctgtagagccagcgagagcgtgaccatcctgggcagccacctgatctactggtatcagcagaagcccggccagccccccagactgctgattcagctggcctccaatgtgcagaccggcgtgccagccagattttccggcagcggcagcagaaccgacttcaccctgaccatcagcagcgtggaacccgaggacttcgccgtgtactactgcctccagagccggaccatccccagaacattcggccagggcaccaagctggaaatcaagagaggcggaggcggaagtggaggcggaggatctggcggcggaggctctcaggtgcagctggtgcagtctggccccgaagtgaagaaacccggcgagtccgtgaagatcagctgcaaggccagcggctacaccttccggcactacagcatgaactgggtcaagcaggccccaggccagggcctgaagtggatgggcagaatcaacaccgagagcggcgtgcccatctacgccgacgacttcaagggccggttcagcttcaccgtggacaccagcgccagcaccgcctacctggaaatctccagcctgaccagcgaggataccgccgtgtatttctgctccaacgactacctgtacagcctggatttctggggccagggaaccaccctgacagtgtcctctacgcgtacgcgtggaggtggtggctccgacatcaagctccagcagtctggcgctgagcttgctagacctggcgcttccgtgaagatgagctgcaagaccagcggctacaccttcaccagatacaccatgcactgggtcaagcagcggcctggacaaggactggaatggatcggctacatcaaccccagccggggctacaccaactacaaccagaagttcaaggacaaggccacactgaccaccgacaagagcagcagcacagcctacatgcagctgagcagcctgaccagcgaagatagcgccgtgtactactgcgcccggtactacgacgatcactactgcctggattactggggccagggcacaaccctgacagtgtcatctgtggaaggcggctctggtggcagcggaggttctggtggatctggcggagtggatgacatccagctgacacagagccccgccatcatgagtgcttccccaggcgagaaagtgaccatgacctgtagagccagcagcagcgtgtcctacatgaactggtatcagcagaagtccggcacaagccccaagcggtggatctacgataccagcaaagtggcctccggcgtgccctacagattttctggctctggcagcggcaccagctactccctgacaatcagcagcatggaagccgaggatgccgccacctactactgccagcagtggtccagcaatcccctgacatttggagccggcaccaagctggaactgaagcatcaccaccatcaccac

SEQ ID NO: 2479 - DNA, 1566 bp, Artificial Sequence
  Synthetic Polynucleotide
atggccttaccagtgaccgccttgctcctgccgctggccttgctgctccacgccgccaggccggacatcgtgctgacacagagccctgcttctctggccgtgtctctgggagagagagccaccatcaactgtagagccagcgagagcgtgtccgtgattggagcccacctgatccactggtatcagcagaagcctggacagcctcctaagctgctgatctacctggcctccaacctggaaacaggcgtgccagccagattttctggcagcggctctggcaccgatttcaccctgacaatcagcagcctccaggccgaagatgccgccatctactactgcctccagagccggatcttccccagaacctttggacagggcaccaagctggaaatcaaaggcggaggcggaagtggaggcggaggatctggcggcggaggctctcaagttcagctggtgcagtctggctccgagctgaagaaacctggcgagtccgtgaagatcagctgcaaggccagcggctacaccttcaccgactacagcatcaactgggtcaagcaggcccctggacagggactgaaatggatgggctggatcaacaccgagacaagagagcccgcctacgcctacgacttcagaggcagattcgtgttctccctggacaccagcgccagcacagcctatctccagatcagctctctgaaggccgaggataccgccgtgtacttctgcgccctggactacagctacgctatggactattggggccagggcaccctggtcacagtctcttctacgcgtacgcgtggaggtggtggctccgacatcaagctccagcagtctggcgctgagcttgctagacctggcgcttccgtgaagatgagctgcaagaccagcggctacaccttcaccagatacaccatgcactgggtcaagcagcggcctggacaaggactggaatggatcggctacatcaaccccagccggggctacaccaactacaaccagaagttcaaggacaaggccacactgaccaccgacaagagcagcagcacagcctacatgcagctgagcagcctgaccagcgaagatagcgccgtgtactactgcgcccggtactacgacgatcactactgcctggattactggggccagggcacaaccctgacagtgtcatctgtggaaggcggctctggtggcagcggaggttctggtggatctggcggagtggatgacatccagctgacacagagccccgccatcatgagtgcttccccaggcgagaaagtgaccatgacctgtagagccagcagcagcgtgtcctacatgaactggtatcagcagaagtccggcacaagccccaagcggtggatctacgataccagcaaagtggcctccggcgtgccctacagattttctggctctggcagcggcaccagctactccctgacaatcagcagcatggaagccgaggatgccgccacctactactgccagcagtggtccagcaatcccctgacatttggagccggcaccaagctggaactgaagcatcaccaccatcaccac

SEQ ID NO: 2480 - DNA, 1569 bp, Artificial Sequence
  Synthetic Polynucleotide
atggccttaccagtgaccgccttgctcctgccgctggccttgctgctccacgccgccaggccggacatcgtgctgacacagtctcccgccacactgtcactgagccctggcgatagagccacactgagctgtagagccagcgagagcgtgacaatcctgggcagccacctgatctactggtatcagcagaagcccggacaggcccctagactgctgattcagctcgccagcaatgtgcagacaggcatccctgccagattttccggcagcggcagcagaaccgatttcaccctgaccataagcagcctggaacctgaggacttcgccgtgtactactgcctccagagccggacaatccccagaacctttggacagggcaccaagctggaaatcaagagaggcggaggcggaagtggaggcggaggatctggcggcggaggctctcaagttcaactggtgcagagcggctccgagctgaagaaacctggcgagtccgtgaagattagctgcaaggccagcggctacaccttcacacactacagcatgaactgggtccgacaggctccaggccaaggactggaatggatgggcagaatcaacaccgagacaggcgagcccctgtacgccgacgatttcaagggcagattcgtgttcagcctggacaccagcgccagcacagcctatctccagatcagctctctgaaggccgaggacaccgccgtgtattattgcagcaacgactacctgtactccctggactattggggccagggcacactggtcacagtgtctagtacgcgtacgcgtggaggtggtggctccgacatcaagctccagcagtctggcgctgagcttgctagacctggcgcttccgtgaagatgagctgcaagaccagcggctacaccttcaccagatacaccatgcactgggtcaagcagcggcctggacaaggactggaatggatcggctacatcaaccccagccggggctacaccaactacaaccagaagttcaaggacaaggccacactgaccaccgacaagagcagcagcacagcctacatgcagctgagcagcctgaccagcgaagatagcgccgtgtactactgcgcccggtactacgacgatcactactgcctggattactggggccagggcacaaccctgacagtgtcatctgtggaaggcggctctggtggcagcggaggttctggtggatctggcggagtggatgacatccagctgacacagagccccgccatcatgagtgcttccccaggcgagaaagtgaccatgacctgtagagccagcagcagcgtgtcctacatgaactggtatcagcagaagtccggcacaagccccaagcggtggatctacgataccagcaaagtggcctccggcgtgccctacagattttctggctctggcagcggcaccagctactccctgacaatcagcagcatggaagccgaggatgccgccacctactactgccagcagtggtccagcaatcccctgacatttggagccggcaccaagctggaactgaagcatcaccaccatcaccac

SEQ ID NO: 2481 - DNA, 1572 bp, Artificial Sequence
  Synthetic Polynucleotide
atggccttaccagtgaccgccttgctcctgccgctggccttgctgctccacgccgccaggccggacgagatcgtgctgacacagagccctgccaccctgtctctgagccctggcgaaagagccaccctgagctgtagagccagccagagcgtgtccagctacctggcctggtatcagcagaagcccggccaggctccccggctgctgatctacgatgccagcaatagagccaccggcatccccgccagattttccggctctggcagcggcaccgacttcaccctgaccatcagctccctggaacccgaggacttcgccgtgtactactgccagcagcggagcaactggcccatcacattcggccagggcacccggctggaaatcaaaggcggaggcggaagtggaggcggaggatctggcggcggaggctctgaagtgcagctggtggaatcaggcggcggactggtgcagcctggcagaagcctgagactgagctgtgccgccagcggcttcaccttcaacgactacgccatgcactgggtgcgccaggcccctggaaaaggactggaatgggtgtccacaatcagctggaacagcggcagcatcggctacgccgatagcgtgaagggccggttcaccatcagccgggacaacgccaagaagtccctgtacctccagatgaacagcctgcgggccgaggacacagccctgtactattgcgccaaggacatccagtacggcaactactactacggcatggacgtgtggggccagggaaccaccgtgaccgtgtcatctacgcgtacgcgtggaggtggtggctccgacatcaagctccagcagtctggcgctgagcttgctagacctggcgcttccgtgaagatgagctgcaagaccagcggctacaccttcaccagatacaccatgcactgggtcaagcagcggcctggacaaggactggaatggatcggctacatcaaccccagccggggctacaccaactacaaccagaagttcaaggacaaggccacactgaccaccgacaagagcagcagcacagcctacatgcagctgagcagcctgaccagcgaagatagcgccgtgtactactgcgcccggtactacgacgatcactactgcctggattactggggccagggcacaaccctgacagtgtcatctgtggaaggcggctctggtggcagcggaggttctggtggatctggcggagtggatgacatccagctgacacagagccccgccatcatgagtgcttccccaggcgagaaagtgaccatgacctgtagagccagcagcagcgtgtcctacatgaactggtatcagcagaagtccggcacaagccccaagcggtggatctacgataccagcaaagtggcctccggcgtgccctacagattttctggctctggcagcggcaccagctactccctgacaatcagcagcatggaagccgaggatgccgccacctactactgccagcagtggtccagcaatcccctgacatttggagccggcaccaagctggaactgaagcatcaccaccatcaccac

SEQ ID NO: 2482 - DNA, 1578 bp, Artificial Sequence
  Synthetic Polynucleotide
atggccttaccagtgaccgccttgctcctgccgctggccttgctgctccacgccgccaggccggacatcgtgatgacccagacccccctgagcctgcctgtgacacctggcgagcctgccagcatctcctgcagaagcagcaagagcctgctgcacagcaacggcatcacctacctgtactggtatctgcagaaacccggccagagcccccaactgctgatctaccagatgagcaacctggtgtccggcgtgcccgacagattttctggcagcggctccggcaccgacttcaccctgaagatcagccgggtggaagccgaggacgtgggcgtgtactactgcgcccagaacctggaactgccctacacctttggcggcggaacaaaggtggaaatcaagcggggcggaggcggaagtggaggcggaggatctggcggcggaggctctcaggtgcaactggtgcagagcggagccgaagtgaaaaagcccggcagcagcgtgaaggtgtcctgcaaggccagcggctacgccttcagctactcctggatcaactgggtgcgccaggcccctggacagggcctggaatggatgggcagaatcttccccggcgacggcgacaccgactacaacggcaagttcaagggcagagtgaccatcaccgccgacaagagcaccagcaccgcctacatggaactgagcagcctgcggagcgaggataccgccgtgtactattgtgccagaaacgtgttcgacggctactggctggtgtactggggccagggaacacttgtgaccgtgtccagcacgcgtacgcgtggaggtggtggctccgacatcaagctccagcagtctggcgctgagcttgctagacctggcgcttccgtgaagatgagctgcaagaccagcggctacaccttcaccagatacaccatgcactgggtcaagcagcggcctggacaaggactggaatggatcggctacatcaaccccagccggggctacaccaactacaaccagaagttcaaggacaaggccacactgaccaccgacaagagcagcagcacagcctacatgcagctgagcagcctgaccagcgaagatagcgccgtgtactactgcgcccggtactacgacgatcactactgcctggattactggggccagggcacaaccctgacagtgtcatctgtggaaggcggctctggtggcagcggaggttctggtggatctggcggagtggatgacatccagctgacacagagccccgccatcatgagtgcttccccaggcgagaaagtgaccatgacctgtagagccagcagcagcgtgtcctacatgaactggtatcagcagaagtccggcacaagccccaagcggtggatctacgataccagcaaagtggcctccggcgtgccctacagattttctggctctggcagcggcaccagctactccctgacaatcagcagcatggaagccgaggatgccgccacctactactgccagcagtggtccagcaatcccctgacatttggagccggcaccaagctggaactgaagcatcaccaccatcaccac

SEQ ID NO: 2483 - DNA, 1569 bp, Artificial Sequence
  Synthetic Polynucleotide
atggccttaccagtgaccgccttgctcctgccgctggccttgctgctccacgccgccaggccggacatccagatgacacagagccctagcagcctgtctgccagcgtgggagacagagtgaccatcacctgtagagccagcagcagcgtgtcctacatgcactggtatcagcagaagcccggcaaggcccctaagcctctgatctacgcccctagcaatctggcctctggcgtgccaagcagattttctggcagcggctctggcaccgacttcaccctgacaatatccagcctccagcctgaggacttcgccacctactactgccagcagtggtccttcaatcctcctaccttcggccagggcaccaaggtggaaatcaaaagaggcggaggcggaagtggaggcggaggatctggcggcggaggctctgaagtgcagcttgttgaatctggcggcggactggttcagcctggcggatctctgagactgtcttgtgccgccagcggctacaccttcaccagctacaatatgcactgggtccgacaggcccctggcaaaggacttgaatgggtcggagccatctatcccggcaacggcgacacctcctacaaccagaagttcaagggcagattcaccatcagcgtggacaagagcaagaacaccctgtacctccagatgaactccctgagagccgaggacaccgccgtgtactattgtgccagagtggtgtactacagcaacagctactggtacttcgacgtgtggggccagggaaccctggtcacagtttcttctacgcgtacgcgtggaggtggtggctccgacatcaagctccagcagtctggcgctgagcttgctagacctggcgcttccgtgaagatgagctgcaagaccagcggctacaccttcaccagatacaccatgcactgggtcaagcagcggcctggacaaggactggaatggatcggctacatcaaccccagccggggctacaccaactacaaccagaagttcaaggacaaggccacactgaccaccgacaagagcagcagcacagcctacatgcagctgagcagcctgaccagcgaagatagcgccgtgtactactgcgcccggtactacgacgatcactactgcctggattactggggccagggcacaaccctgacagtgtcatctgtggaaggcggctctggtggcagcggaggttctggtggatctggcggagtggatgacatccagctgacacagagccccgccatcatgagtgcttccccaggcgagaaagtgaccatgacctgtagagccagcagcagcgtgtcctacatgaactggtatcagcagaagtccggcacaagccccaagcggtggatctacgataccagcaaagtggcctccggcgtgccctacagattttctggctctggcagcggcaccagctactccctgacaatcagcagcatggaagccgaggatgccgccacctactactgccagcagtggtccagcaatcccctgacatttggagccggcaccaagctggaactgaagcatcaccaccatcaccac

SEQ ID NO: 2484 - DNA, 1575 bp, Artificial Sequence
  Synthetic Polynucleotide
atggccttaccagtgaccgccttgctcctgccgctggccttgctgctccacgccgccaggccgcagatcgtgctgtctcagtctcctgccatcctgagcgcttccccaggcgagaaagtgaccatgacctgtagagccagcagcagcgtgtcctacatgcactggtatcagcagaagcccggcagcagccctaagccttggatctacgccaccagcaatctggcctctggcgtgccagccagattttctggctctggcagcggcaccagctacagcttcacaatcagcagagtggaagccgaggacgccgccacctactattgtcagcagtggaccttcaatcctcctaccttcggcggaggcacccggctggaaatcaaaagaacagtggctgctggcggaggcggaagtggaggcggaggatctggcggcggaggctctcaggcttatctgcaacagagcggagccgaactcgtcagacctggcgcttctgtgaagatgagctgcaaggccagcggctacaccttcaccagctataatatgcactgggtcaagcagacccctcggcagggactcgaatggatcggcggaatctatcccggcaacggcgacacctcctacaaccagaagttcaagggcaaagccacactgaccgtgggcaagagcagcagcaccgcctatatgcagctcagcagcctgaccagcgaggacagcgccgtgtacttctgcgccagatacgactacaactacgctatggactactggggccagggcaccagcgtgacagttagctctgccagcacgcgtacgcgtggaggtggtggctccgacatcaagctccagcagtctggcgctgagcttgctagacctggcgcttccgtgaagatgagctgcaagaccagcggctacaccttcaccagatacaccatgcactgggtcaagcagcggcctggacaaggactggaatggatcggctacatcaaccccagccggggctacaccaactacaaccagaagttcaaggacaaggccacactgaccaccgacaagagcagcagcacagcctacatgcagctgagcagcctgaccagcgaagatagcgccgtgtactactgcgcccggtactacgacgatcactactgcctggattactggggccagggcacaaccctgacagtgtcatctgtggaaggcggctctggtggcagcggaggttctggtggatctggcggagtggatgacatccagctgacacagagccccgccatcatgagtgcttccccaggcgagaaagtgaccatgacctgtagagccagcagcagcgtgtcctacatgaactggtatcagcagaagtccggcacaagccccaagcggtggatctacgataccagcaaagtggcctccggcgtgccctacagattttctggctctggcagcggcaccagctactccctgacaatcagcagcatggaagccgaggatgccgccacctactactgccagcagtggtccagcaatcccctgacatttggagccggcaccaagctggaactgaagcatcaccaccatcaccac

SEQ ID NO: 2485 - DNA, 1569 bp, Artificial Sequence; identical to SEQ ID NO: 2483
  Synthetic Polynucleotide

SEQ ID NO: 2486 - DNA, 1572 bp, Artificial Sequence
  Synthetic Polynucleotide
atggccttaccagtgaccgccttgctcctgccgctggccttgctgctccacgccgccaggccggacgagatcgtgctgacacagagccctgccaccctgtctctgagccctggcgaaagagccaccctgagctgtagagccagccagagcgtgtccagctacctggcctggtatcagcagaagcccggccaggctccccggctgctgatctacgatgccagcaatagagccaccggcatccccgccagattttccggctctggcagcggcaccgacttcaccctgaccatcagctccctggaacccgaggacttcgccgtgtactactgccagcagcggagcaactggcccatcacattcggccagggcacccggctggaaatcaaaggcggaggcggaagtggaggcggaggatctggcggcggaggctctgaggtgcagcttgttgagtctggcggaggactggtgcagcccgatagaagcctgagactgtcttgtgccgccagcggcttcaccttccacgattatgccatgcactgggtccgacaggcccctggcaaaggacttgaatgggtgtccaccatctcttggaacagcggcacaatcggctacgccgactctgtgaagggcagattcaccatcagccgggacaacgccaagaacagcctgtacctccagatgaactccctgagagccgaggacacagccctgtactactgcgccaaggacatccagtacggcaactactactacggcatggacgtgtggggccagggcacaacagtgacagtctcttctacgcgtacgcgtggaggtggtggctccgacatcaagctccagcagtctggcgctgagcttgctagacctggcgcttccgtgaagatgagctgcaagaccagcggctacaccttcaccagatacaccatgcactgggtcaagcagcggcctggacaaggactggaatggatcggctacatcaaccccagccggggctacaccaactacaaccagaagttcaaggacaaggccacactgaccaccgacaagagcagcagcacagcctacatgcagctgagcagcctgaccagcgaagatagcgccgtgtactactgcgcccggtactacgacgatcactactgcctggattactggggccagggcacaaccctgacagtgtcatctgtggaaggcggctctggtggcagcggaggttctggtggatctggcggagtggatgacatccagctgacacagagccccgccatcatgagtgcttccccaggcgagaaagtgaccatgacctgtagagccagcagcagcgtgtcctacatgaactggtatcagcagaagtccggcacaagccccaagcggtggatctacgataccagcaaagtggcctccggcgtgccctacagattttctggctctggcagcggcaccagctactccctgacaatcagcagcatggaagccgaggatgccgccacctactactgccagcagtggtccagcaatcccctgacatttggagccggcaccaagctggaactgaagcatcaccaccatcaccac

SEQ ID NO: 2487 - DNA, 1581 bp, Artificial Sequence
  Synthetic Polynucleotide
atggccttaccagtgaccgccttgctcctgccgctggccttgctgctccacgccgccaggccggacatccagatgacccagagccccagcagcctgtctgccagcgtgggcgacagagtgaccatcacctgtcggagcagccagagcatcgtgcactccgtgggcaacaccttcctggaatggtatcagcagaagcccggcaaggcccccaagctgctgatctacaaggtgtccaacagattcagcggcgtgcccagcaggtttagcggctctggcagcggcaccgacttcaccctgaccatctctagcctccagcccgaggacttcgccacctactactgttttcaaggcagccagttcccctacaccttcggccagggaacaaaggtggaaatcaagcggggcggaggcggaagtggaggcggaggatctggcggcggaggctctgaagtgcaactggtggaaagcggaggcggcctggtgcagcctggcggatctctgagactgagctgtgccgccagcggctacgagttcagccggtcctggatgaactgggtgcgccaggcccctggcaagggactggaatgggtgggaagaatctaccccggcgacggcgacaccaactacagcggcaagttcaagggccggttcaccatcagcgccgacaccagcaagaacaccgcctacctccagatgaacagcctgcgggccgaggataccgccgtgtactactgtgccagagatggcagctcctgggactggtacttcgacgtgtggggacagggaacccttgtgaccgtgtccagcacgcgtacgcgtggaggtggtggctccgacatcaagctccagcagtctggcgctgagcttgctagacctggcgcttccgtgaagatgagctgcaagaccagcggctacaccttcaccagatacaccatgcactgggtcaagcagcggcctggacaaggactggaatggatcggctacatcaaccccagccggggctacaccaactacaaccagaagttcaaggacaaggccacactgaccaccgacaagagcagcagcacagcctacatgcagctgagcagcctgaccagcgaagatagcgccgtgtactactgcgcccggtactacgacgatcactactgcctggattactggggccagggcacaaccctgacagtgtcatctgtggaaggcggctctggtggcagcggaggttctggtggatctggcggagtggatgacatccagctgacacagagccccgccatcatgagtgcttccccaggcgagaaagtgaccatgacctgtagagccagcagcagcgtgtcctacatgaactggtatcagcagaagtccggcacaagccccaagcggtggatctacgataccagcaaagtggcctccggcgtgccctacagattttctggctctggcagcggcaccagctactccctgacaatcagcagcatggaagccgaggatgccgccacctactactgccagcagtggtccagcaatcccctgacatttggagccggcaccaagctggaactgaagcatcaccaccatcaccac

SEQ ID NO: 2488 - DNA, 1557 bp, Artificial Sequence
  Synthetic Polynucleotide
atggccttaccagtgaccgccttgctcctgccgctggccttgctgctccacgccgccaggccggacatcgtgatgacccagagccccagcagcctgtctgccagcgtgggcgacagagtgaccatcacatgcaaggccagccagagcgtgaccaacgacgtggcctggtatcagcagaagcccggcaaggcccccaagctgctgatctactacgccagcaacagatacaccggcgtgcccagcagattcagcggctctggcagcggcaccgacttcaccctgaccatctctagcctccagcccgaggacttcgccacctactactgtcagcaggactacagaagcccctggaccttcggcggaggcaccaaggtggaaatcaagcggggcggaggcggaagtggaggcggaggatctggcggcggaggctctcaggtgcaactggaagaaagcgggggaggcgtcgtgcggcctggaagaagtctgagactgagctgtgccgccagcggcttcaccttcagcgactacggcgtgaactggatcagacaggcccctggcaagggcctggaatgggtcacaatcatctggggcgacggcagaaccgactacaacagcgccctgaagtcccggttcaccgtgtcccggaacaacagcaacaacaccctgagcctccagatgaacagcctgaccaccgaggacaccgccgtgtactactgtgtgcgggctcccggcaaccgggctatggaatattggggacagggcgtactcgtgaccgtgtcctctacgcgtacgcgtggaggtggtggctccgacatcaagctccagcagtctggcgctgagcttgctagacctggcgcttccgtgaagatgagctgcaagaccagcggctacaccttcaccagatacaccatgcactgggtcaagcagcggcctggacaaggactggaatggatcggctacatcaaccccagccggggctacaccaactacaaccagaagttcaaggacaaggccacactgaccaccgacaagagcagcagcacagcctacatgcagctgagcagcctgaccagcgaagatagcgccgtgtactactgcgcccggtactacgacgatcactactgcctggattactggggccagggcacaaccctgacagtgtcatctgtggaaggcggctctggtggcagcggaggttctggtggatctggcggagtggatgacatccagctgacacagagccccgccatcatgagtgcttccccaggcgagaaagtgaccatgacctgtagagccagcagcagcgtgtcctacatgaactggtatcagcagaagtccggcacaagccccaagcggtggatctacgataccagcaaagtggcctccggcgtgccctacagattttctggctctggcagcggcaccagctactccctgacaatcagcagcatggaagccgaggatgccgccacctactactgccagcagtggtccagcaatcccctgacatttggagccggcaccaagctggaactgaagcatcaccaccatcaccac

SEQ ID NO: 2489 - DNA, 1575 bp, Artificial Sequence
  Synthetic Polynucleotide
atggccttaccagtgaccgccttgctcctgccgctggccttgctgctccacgccgccaggccgcaggtgcagctccagcagtctggacccggcctcgtgaagcctagccagacactgagcctgacctgcgccatcagcggcgatagcgtgtccagcaatagcgccgcctggaactggatcagacagtccccctctcggggcctggaatggctgggccggacctactaccgcagcaagtggtacaacgactacgccgtgtccgtgaagtcccggatcaccatcaaccccgacaccagcaagaaccagttctccttgcaactgaacagcgtgacccccgaggacaccgccgtgtactactgcgccagagaagtgaccggcgacctggaagatgccttcgacatctggggccagggaacaatggtcacagtgtccagcggcggaggcggaagtggaggcggaggatctggcggcggaggctctgacatccagatgacccagagccccagcagcctgtctgccagcgtgggcgacagagtgaccatcacctgtagagccagccagaccatctggtcctacctgaactggtatcagcagaggcccggcaaggcccccaacctgctgatctatgccgccagctctctccagagcggcgtgcccagcagattttccggcagaggcagcggcaccgacttcaccctgaccatcagttccttgcaggccgaggacttcgccacctactactgccagcagagctacagcatcccccagattttcggccagggcaccaagctggaaatcaagacgcgtacgcgtggaggtggtggctccgacatcaagctccagcagtctggcgctgagcttgctagacctggcgcttccgtgaagatgagctgcaagaccagcggctacaccttcaccagatacaccatgcactgggtcaagcagcggcctggacaaggactggaatggatcggctacatcaaccccagccggggctacaccaactacaaccagaagttcaaggacaaggccacactgaccaccgacaagagcagcagcacagcctacatgcagctgagcagcctgaccagcgaagatagcgccgtgtactactgcgcccggtactacgacgatcactactgcctggattactggggccagggcacaaccctgacagtgtcatctgtggaaggcggctctggtggcagcggaggttctggtggatctggcggagtggatgacatccagctgacacagagccccgccatcatgagtgcttccccaggcgagaaagtgaccatgacctgtagagccagcagcagcgtgtcctacatgaactggtatcagcagaagtccggcacaagccccaagcggtggatctacgataccagcaaagtggcctccggcgtgccctacagattttctggctctggcagcggcaccagctactccctgacaatcagcagcatggaagccgaggatgccgccacctactactgccagcagtggtccagcaatcccctgacatttggagccggcaccaagctggaactgaagcatcaccaccatcaccac

SEQ ID NO: 2490 - DNA, 1572 bp, Artificial Sequence
  Synthetic Polynucleotide
atggccttaccagtgaccgccttgctcctgccgctggccttgctgctccacgccgccaggccggaggtgcaactggttgagtctggcggaggactggtgcagcctggaagaagcctgagactgtcttgtgccgccagcggcttcaccttcgacgattatgccatgcactgggtccgacaggcccctggcaaaggacttgaatgggtgtccggcatctcctggaacagcggctctatcggctacgccgattccgtgaagggcagattcaccatcagccgggacaacgccaagaacagcctgtacctccagatgaactccctgagagccgaggacacagccctgtactactgcgccaaagacaaaggcggaggctactacgacttttggagcggcagcgattattggggccagggcacactggtcacagtgtctagcggcggaggcggaagtggaggcggaggatctggcggcggaggctcttcttctgagctgacacaggaccctgccgtgtctgttgctctgggccagacagtgcggattacctgtcagggcgatagcctgagaagctactacgcctcctggtatcagcagaagccaggccaggctcctgtgctggtcatctacggcaagaacaacagacccagcggcatccccgatagattcagcggaagcagctctggcaataccgccagcctgacaattactggcgctcaggccgaggacgaggccgactactactgcaacagcagagatagcagcggctgggttttcggcggaggcacaaaactgacagtgctgacgcgtacgcgtggaggtggtggctccgacatcaagctccagcagtctggcgctgagcttgctagacctggcgcttccgtgaagatgagctgcaagaccagcggctacaccttcaccagatacaccatgcactgggtcaagcagcggcctggacaaggactggaatggatcggctacatcaaccccagccggggctacaccaactacaaccagaagttcaaggacaaggccacactgaccaccgacaagagcagcagcacagcctacatgcagctgagcagcctgaccagcgaagatagcgccgtgtactactgcgcccggtactacgacgatcactactgcctggattactggggccagggcacaaccctgacagtgtcatctgtggaaggcggctctggtggcagcggaggttctggtggatctggcggagtggatgacatccagctgacacagagccccgccatcatgagtgcttccccaggcgagaaagtgaccatgacctgtagagccagcagcagcgtgtcctacatgaactggtatcagcagaagtccggcacaagccccaagcggtggatctacgataccagcaaagtggcctccggcgtgccctacagattttctggctctggcagcggcaccagctactccctgacaatcagcagcatggaagccgaggatgccgccacctactactgccagcagtggtccagcaatcccctgacatttggagccggcaccaagctggaactgaagcatcaccaccatcaccac

SEQ ID NO: 2491 - DNA, 1599 bp, Artificial Sequence
  Synthetic Polynucleotide
atggccttaccagtgaccgccttgctcctgccgctggccttgctgctccacgccgccaggccggaagtgcagctccagcagtctggacctggcctggttaagcctagccagacactgagcctgacctgtgccatcagcggcgatagcgtgctgagcaacagcgacacctggaactggatcagacagagccctagcagaggactggaatggctgggcagaacctaccacagaagcacttggtacgacgactacgccagctctgtgcggggcagagtgtccatcaatgtggacaccagcaagaaccagtacagcctgcaactgaacgccgtgacacctgaggataccggcgtgtactactgcgccagagacagactccaggacggcaactcttggagcgacgcctttgatgtgtggggccagggcacaatggtcaccgtttctagcggcggaggcggaagtggaggcggaggatctggcggcggaggctctcaatctgctctgacacagcctgccagcgtgtcaggatctcctggacagagcatcaccatctcttgcaccggcaccagctctgatgtcggcggctacaattacgtgtcctggtatcagcagcaccccggcaaggcccctaagctgatgatctacgacgtgtccaacagacccagcggcgtgtccaatagattctccggcagcaagagcggcaacaccgccagcctgacaatttctggactgcaagccgaggacgaggccgactactactgtagcagctacaccagcagcagcacactggtgtacgtgttcggcacaggcaccaaagtgaccgtgcttacgcgtacgcgtggaggtggtggctccgacatcaagctccagcagtctggcgctgagcttgctagacctggcgcttccgtgaagatgagctgcaagaccagcggctacaccttcaccagatacaccatgcactgggtcaagcagcggcctggacaaggactggaatggatcggctacatcaaccccagccggggctacaccaactacaaccagaagttcaaggacaaggccacactgaccaccgacaagagcagcagcacagcctacatgcagctgagcagcctgaccagcgaagatagcgccgtgtactactgcgcccggtactacgacgatcactactgcctggattactggggccagggcacaaccctgacagtgtcatctgtggaaggcggctctggtggcagcggaggttctggtggatctggcggagtggatgacatccagctgacacagagccccgccatcatgagtgcttccccaggcgagaaagtgaccatgacctgtagagccagcagcagcgtgtcctacatgaactggtatcagcagaagtccggcacaagccccaagcggtggatctacgataccagcaaagtggcctccggcgtgccctacagattttctggctctggcagcggcaccagctactccctgacaatcagcagcatggaagccgaggatgccgccacctactactgccagcagtggtccagcaatcccctgacatttggagccggcaccaagctggaactgaagcatcaccaccatcaccac

SEQ ID NO: 2492 - DNA, 1575 bp, Artificial Sequence
  Synthetic Polynucleotide
atggccttaccagtgaccgccttgctcctgccgctggccttgctgctccacgccgccaggccggacgacatccagatgacccagaccacaagcagcctgtctgccagcctgggcgacagagtgaccatctcttgtagagccagccaggacatcagcaactacctgaactggtatcagcagaaacccgacggcaccgtgaagctgctgatctactacaccagcatcctgcacagcggcgtgcccagcagattttctggctctggcagcggcaccgactacagcctgaccatcagcaatctggaacaagaggacttcgctacctacttctgccagcaaggcaacaccctgccttggacatttggcggaggcaccaagctggaaatcaaagctggcggaggcggaagtggaggcggaggatctggcggcggaggctctgaagtgcaactggttgaatctggcggcggactggttaagcctggcggatctctgaagctgagctgtgccgcctctggcttcgccttcagcatctacgatatgagctgggtccgacagacccctgagaagagactggaatgggtcgcctacatctctagcggcggagggacctactatcccgacacagtgaagggcagattcaccatctccagagacaacgccaagaacaccctgtacctccagatgagcagcctgaagtccgaggacaccgccatgtactactgcgccagacacagcggctatggcacacattggggagtgctgtttgcctactggggccagggaacactggtcacagtttctgctacgcgtacgcgtggaggtggtggctccgacatcaagctccagcagtctggcgctgagcttgctagacctggcgcttccgtgaagatgagctgcaagaccagcggctacaccttcaccagatacaccatgcactgggtcaagcagcggcctggacaaggactggaatggatcggctacatcaaccccagccggggctacaccaactacaaccagaagttcaaggacaaggccacactgaccaccgacaagagcagcagcacagcctacatgcagctgagcagcctgaccagcgaagatagcgccgtgtactactgcgcccggtactacgacgatcactactgcctggattactggggccagggcacaaccctgacagtgtcatctgtggaaggcggctctggtggcagcggaggttctggtggatctggcggagtggatgacatccagctgacacagagccccgccatcatgagtgcttccccaggcgagaaagtgaccatgacctgtagagccagcagcagcgtgtcctacatgaactggtatcagcagaagtccggcacaagccccaagcggtggatctacgataccagcaaagtggcctccggcgtgccctacagattttctggctctggcagcggcaccagctactccctgacaatcagcagcatggaagccgaggatgccgccacctactactgccagcagtggtccagcaatcccctgacatttggagccggcaccaagctggaactgaagcatcaccaccatcaccac

SEQ ID NO: 2493 - DNA, 1554 bp, Artificial Sequence
  Synthetic Polynucleotide
atggccttaccagtgaccgccttgctcctgccgctggccttgctgctccacgccgccaggccggacatccagatgacccagagccccgccaccatcgagaacacaagcctgtctgccagcgtgggcgacagagtgaccatcacctgtagagccagccagggcatcagctcttggctgacctggtatcagcagaagcccgagaaggcccccaagagcctgatctacgccgccagctctctgcagtctggcgtgcccagcagattttccggcagcggctctggcaccgacttcaccctgacaatcagcagcctgcagcccgaggacttcgccacctactactgccagcagtacgacagctaccccatcaccttcggccagggcacccggctggaaatcaagggcggaggcggaagtggaggcggaggatctggcggcggaggctctcaggtgcaactgcagcagtggggagccggactgctgaagcctagcgagacactgagcctgacctgcgccgtgtacggcggcagcttcagcgcctactattggagctggatcagacagccccctggcaagggcctggaatggatcggcgacatcaatcacggcggaggcaccaactacaaccccagcctgaagtcccgcgtgaccatctccgtggacaccagcaagaaccagttctccctgaagctgaacagcgtgacagccgccgacacagccgtgtactactgtgccagcctgaccgcctattggggccagggatctcttgtgaccgtgtccagcacgcgtacgcgtggaggtggtggctccgacatcaagctccagcagtctggcgctgagcttgctagacctggcgcttccgtgaagatgagctgcaagaccagcggctacaccttcaccagatacaccatgcactgggtcaagcagcggcctggacaaggactggaatggatcggctacatcaaccccagccggggctacaccaactacaaccagaagttcaaggacaaggccacactgaccaccgacaagagcagcagcacagcctacatgcagctgagcagcctgaccagcgaagatagcgccgtgtactactgcgcccggtactacgacgatcactactgcctggattactggggccagggcacaaccctgacagtgtcatctgtggaaggcggctctggtggcagcggaggttctggtggatctggcggagtggatgacatccagctgacacagagccccgccatcatgagtgcttccccaggcgagaaagtgaccatgacctgtagagccagcagcagcgtgtcctacatgaactggtatcagcagaagtccggcacaagccccaagcggtggatctacgataccagcaaagtggcctccggcgtgccctacagattttctggctctggcagcggcaccagctactccctgacaatcagcagcatggaagccgaggatgccgccacctactactgccagcagtggtccagcaatcccctgacatttggagccggcaccaagctggaactgaagcatcaccaccatcaccac

SEQ ID NO: 2494 - DNA, 1569 bp, Artificial Sequence
  Synthetic Polynucleotide
atggccttaccagtgaccgccttgctcctgccgctggccttgctgctccacgccgccaggccggacgagatcgtgctgacccagagccctgatagcctggccgtgtctctgggcgagagagccaccatcaactgcaaggccagccagagcgtggacttcgacggcgacagctacctgaactggtatcagcagaagcccggccagccccccaaggtgctgatctatgccgccagcacactgcagagcggcgtgcccagcagattttctggcagcggctccggcaccgacttcaccctgaccatcaacagcctggaagccgaggacgccgccacctactactgccagcagagcaacgaggacccctggacctttggcggcggaacaaaggtggaaatcaagggcggaggcggaagtggaggcggaggatctggcggcggaggctctcaggtgcaactggtgcagtccggcgctgaagtgaagaaacctggggccagcgtgaaggtgtcctgcaaggtgtccggctacacctttaccgactactacattacctgggtgcgccaggcccctggacaggccctggaatggatgggctggatctaccccggcagcggcaacaccaagtacagccagaagttccagggcagattcgtgttcagcgtggacaccagcgccagcaccgcctacctgcaactgtctagcctgaaggccgaagataccgccgtgtactactgcgccaactacggcaactattggttcgcctattggggccagggaacccttgtgaccgtgtcctctacgcgtacgcgtggaggtggtggctccgacatcaagctccagcagtctggcgctgagcttgctagacctggcgcttccgtgaagatgagctgcaagaccagcggctacaccttcaccagatacaccatgcactgggtcaagcagcggcctggacaaggactggaatggatcggctacatcaaccccagccggggctacaccaactacaaccagaagttcaaggacaaggccacactgaccaccgacaagagcagcagcacagcctacatgcagctgagcagcctgaccagcgaagatagcgccgtgtactactgcgcccggtactacgacgatcactactgcctggattactggggccagggcacaaccctgacagtgtcatctgtggaaggcggctctggtggcagcggaggttctggtggatctggcggagtggatgacatccagctgacacagagccccgccatcatgagtgcttccccaggcgagaaagtgaccatgacctgtagagccagcagcagcgtgtcctacatgaactggtatcagcagaagtccggcacaagccccaagcggtggatctacgataccagcaaagtggcctccggcgtgccctacagattttctggctctggcagcggcaccagctactccctgacaatcagcagcatggaagccgaggatgccgccacctactactgccagcagtggtccagcaatcccctgacatttggagccggcaccaagctggaactgaagcatcaccaccatcaccac

SEQ ID NO: 2495 - DNA, 1560 bp, Artificial Sequence
  Synthetic Polynucleotide
atggccttaccagtgaccgccttgctcctgccgctggccttgctgctccacgccgccaggccggacatccagatgacccagagccccagcagcctgtctgccagcgtgggcgacagagtgaccatcacctgtagagccagccagggcatcagctcttggctggcctggtatcagcagaagcccgagaaggcccccaagagcctgatctacgccgcctctagtctccagagcggcgtgcccagcagattttctggcagcggctccggcaccgacttcaccctgacaatcagctccctccagcccgaggacttcgccacctactactgccagcagtacaacagctaccctcccacctttggcggaggcaccaaggtggaaatcaagggcggaggcggaagtggaggcggaggatctggcggcggaggctctgaagtgcaactggtgcagtctggcggagggctggtgcatcctgggggaagcctgagactgagctgtgccggctctggcttcgccttcagcagcagcaccatgcactggatcagacaggcccctggcaagggcctggaatggatcagcctgatcggaagcggagggggcatctactacggcgacagcgtgaagggccggttcaccatcagccgggacaacgccaagaacagcctgtacctccagatgaactccctgcgggccgaggacatggccgtgtactattgtgtgcggggctacttcgactgggtggactacttcgattactggggccagggcaccctcgtgaccgtgtcatctacgcgtacgcgtggaggtggtggctccgacatcaagctccagcagtctggcgctgagcttgctagacctggcgcttccgtgaagatgagctgcaagaccagcggctacaccttcaccagatacaccatgcactgggtcaagcagcggcctggacaaggactggaatggatcggctacatcaaccccagccggggctacaccaactacaaccagaagttcaaggacaaggccacactgaccaccgacaagagcagcagcacagcctacatgcagctgagcagcctgaccagcgaagatagcgccgtgtactactgcgcccggtactacgacgatcactactgcctggattactggggccagggcacaaccctgacagtgtcatctgtggaaggcggctctggtggcagcggaggttctggtggatctggcggagtggatgacatccagctgacacagagccccgccatcatgagtgcttccccaggcgagaaagtgaccatgacctgtagagccagcagcagcgtgtcctacatgaactggtatcagcagaagtccggcacaagccccaagcggtggatctacgataccagcaaagtggcctccggcgtgccctacagattttctggctctggcagcggcaccagctactccctgacaatcagcagcatggaagccgaggatgccgccacctactactgccagcagtggtccagcaatcccctgacatttggagccggcaccaagctggaactgaagcatcaccaccatcaccac

SEQ ID NO: 2496 - DNA, 1590 bp, Artificial Sequence
  Synthetic Polynucleotide
atggccttaccagtgaccgccttgctcctgccgctggccttgctgctccacgccgccaggccggacgacatcgtgatgacacagtcaccagatagcctcaccgtctccctgggggagcggaccaccattaattgtaaatccagccaaagcgtgctggactcaagcaagaacaagaatagcctcgcctggtatcagcagaagcccggtcagcctccaaagctgctgctttcttgggcctccaccagagagtccgggattcctgataggtttagtggttcaggctccggcacagattttactctgaccattgattctctccagccagaggattctgcaacttattactgccagcaaagcgcccactttcctataacttttggccagggaacccgacttgaaatcaagggcggaggcggaagtggaggcggaggatctggcggcggaggctctcaggtgcagctggtgcagagcggtgccgaagtgaagaaaccaggtgcatccgttaaagtttcatgtaaggctagtggatataccttcaccaattacggaatgaactgggtgaaacaggcccctggccagggactgaagtggatggggtggattaacacctacaccggggagccgacttatgcagacgactttaaggggcgggtcacgatgacctccgacacctccaccagtaccgcctacctggagctgcacaaccttaggtcagacgataccgccgtgtattactgtgcccgatggtcttggtccgacggatactatgtctacttcgactattggggccaggggaccacagttaccgtgtcctctacgcgtacgcgtggaggtggtggctccgacatcaagctccagcagtctggcgctgagcttgctagacctggcgcttccgtgaagatgagctgcaagaccagcggctacaccttcaccagatacaccatgcactgggtcaagcagcggcctggacaaggactggaatggatcggctacatcaaccccagccggggctacaccaactacaaccagaagttcaaggacaaggccacactgaccaccgacaagagcagcagcacagcctacatgcagctgagcagcctgaccagcgaagatagcgccgtgtactactgcgcccggtactacgacgatcactactgcctggattactggggccagggcacaaccctgacagtgtcatctgtggaaggcggctctggtggcagcggaggttctggtggatctggcggagtggatgacatccagctgacacagagccccgccatcatgagtgcttccccaggcgagaaagtgaccatgacctgtagagccagcagcagcgtgtcctacatgaactggtatcagcagaagtccggcacaagccccaagcggtggatctacgataccagcaaagtggcctccggcgtgccctacagattttctggctctggcagcggcaccagctactccctgacaatcagcagcatggaagccgaggatgccgccacctactactgccagcagtggtccagcaatcccctgacatttggagccggcaccaagctggaactgaagcatcaccaccatcaccac

SEQ ID NO: 2497 - DNA, 1578 bp, Artificial Sequence
  Synthetic Polynucleotide
atggccttaccagtgaccgccttgctcctgccgctggccttgctgctccacgccgccaggccggacgagatcgtgctgacacagagccctggaagcctggccgtgtctcctggcgagcgcgtgacaatgagctgcaagagcagccagagcgtgttcttcagcagctcccagaagaactacctggcctggtatcagcagatccccggccagagccccagactgctgatctactgggccagcaccagagaaagcggcgtgcccgatagattcaccggcagcggctctggcaccgacttcaccctgacaatcagcagcgtgcagcccgaggacctggctatctactactgccaccagtacctgagcagccggaccttcggccagggcaccaagctggaaatcaagagaggcggaggcggaagtggaggcggaggatctggcggcggaggctctcaggtgcaactgcagcagcctggcgctgaggtcgtgaagccaggcgcttccgtgaagatgtcctgcaaggccagcggctacaccttcaccagctactacatccactggatcaagcagacccctggacagggcctggaatgggtgggagtgatctaccccggcaacgacgacatcagctacaaccagaagttccagggcaaggccaccctgaccgccgacaagtctagcaccaccgcctacatgcaactgtccagcctgaccagcgaggacagcgccgtgtactactgcgccagagaagtgcggctgcggtacttcgatgtgtggggccagggaaccaccgtgaccgtgtcatctacgcgtacgcgtggaggtggtggctccgacatcaagctccagcagtctggcgctgagcttgctagacctggcgcttccgtgaagatgagctgcaagaccagcggctacaccttcaccagatacaccatgcactgggtcaagcagcggcctggacaaggactggaatggatcggctacatcaaccccagccggggctacaccaactacaaccagaagttcaaggacaaggccacactgaccaccgacaagagcagcagcacagcctacatgcagctgagcagcctgaccagcgaagatagcgccgtgtactactgcgcccggtactacgacgatcactactgcctggattactggggccagggcacaaccctgacagtgtcatctgtggaaggcggctctggtggcagcggaggttctggtggatctggcggagtggatgacatccagctgacacagagccccgccatcatgagtgcttccccaggcgagaaagtgaccatgacctgtagagccagcagcagcgtgtcctacatgaactggtatcagcagaagtccggcacaagccccaagcggtggatctacgataccagcaaagtggcctccggcgtgccctacagattttctggctctggcagcggcaccagctactccctgacaatcagcagcatggaagccgaggatgccgccacctactactgccagcagtggtccagcaatcccctgacatttggagccggcaccaagctggaactgaagcatcaccaccatcaccac

SEQ ID NO: 2498 - DNA, 1653 bp, Artificial Sequence
  Synthetic Polynucleotide
atggccttaccagtgaccgccttgctcctgccgctggccttgctgctccacgccgccaggccgtacatcaacatctacaacgccgagcctgccaatcctagcgagaagaacagccccacacagtacgcctacggcagcggagaattcgacatcgtgatgacacagagccctagcagcctgtctgcctctctcggcggcaaagtgaccatcacatgcaaggccagccaggacatcaacaagtatatcgcctggtatcagcacaagcccggcaagggacctagactgctgatccactacaccagcacactccagcctggcatccccagcagattttctggcagcggctccggcagagactacagcttcagcatcagcaacctggaacctgaggacattgccacctactactgcctccagtacgacaacctgctgacctttggagccggcaccaagctggaactgaaaagaggcggaggcggaagtggaggcggaggatctggcggcggaggctctgaagtgaaactccagcagagcggccctgagctggttaagcctggcaccagcgtgaaggtgtcctgtaaagccagcggctactccttcaccgactacaacatgtactgggtcaagcagagccacggcaagagcctggaatggatcggctacatcgacccctacaaaggcggcaccatctacaaccagaagttcaagggcaaagccacactgaccgtggacaagagcagcagcaccgccttcatgcacctgaacagcctgaccagcgaggacagcgccgtgtactattgcgccagagagatgattaccgcctactacttcgactactggggccagggaagcagcgtgaccgttagctctctggaaagaacgcgtacgcgtggaggtggtggctccgacatcaagctccagcagtctggcgctgagcttgctagacctggcgcttccgtgaagatgagctgcaagaccagcggctacaccttcaccagatacaccatgcactgggtcaagcagcggcctggacaaggactggaatggatcggctacatcaaccccagccggggctacaccaactacaaccagaagttcaaggacaaggccacactgaccaccgacaagagcagcagcacagcctacatgcagctgagcagcctgaccagcgaagatagcgccgtgtactactgcgcccggtactacgacgatcactactgcctggattactggggccagggcacaaccctgacagtgtcatctgtggaaggcggctctggtggcagcggaggttctggtggatctggcggagtggatgacatccagctgacacagagccccgccatcatgagtgcttccccaggcgagaaagtgaccatgacctgtagagccagcagcagcgtgtcctacatgaactggtatcagcagaagtccggcacaagccccaagcggtggatctacgataccagcaaagtggcctccggcgtgccctacagattttctggctctggcagcggcaccagctactccctgacaatcagcagcatggaagccgaggatgccgccacctactactgccagcagtggtccagcaatcccctgacatttggagccggcaccaagctggaactgaagcatcaccaccatcaccac

SEQ ID NO: 2499 - DNA, 1701 bp, Artificial Sequence
  Synthetic Polynucleotide
atggccttaccagtgaccgccttgctcctgccgctggccttgctgctccacgccgccaggccggacatccagatgacacagagccctagcagcctgtctgccagcgtgggagatagagtgaccatcaactgcaaggccagccaggacatcaacagctacctgagctggttccagcagaagcctggcaaggcccctaagacactgatctaccgggccaacagactggtggatggcgtgccaagcagattttctggcagcggcagcggccaggattacaccctgacaatatccagcctccagcctgaggacttcgccacctactactgcctccagtacgacgagttccctctgacctttggcggaggcaccaaggtggaaatcaaaggcggaggcggaagtggaggcggaggatctggcggcggaggctctcaggtgcaactggtgcagtctggggccgaagtgaagaaacctggggcctctgtgaaggtgtcctgcaaagccagcggctacacctttaccaactacgacatcaactgggtccgacaggctccaggccaaggactggaatggatcggctggatctatcctggcgacggcagcaccaagtacaacgagaagttcaaggccaaggccacactgaccgccgataccagcacaagcaccgcctacatggaactgcggagcctgagaagcgacgacaccgccgtgtactattgtgcctccggctacgaggacgctatggactattggggccagggcaccaccgtgacagtgtctagtgccaagcctaccaccacaccagctccaagacctccaactcctgctcctacaatcgccagccagcctctgtctctcagacccgaagcctgtagacctgctgctggcggagctgtgcataccagaggactggatttcgcctgcgacatcacgcgtacgcgtggaggtggtggctccgacatcaagctccagcagtctggcgctgagcttgctagacctggcgcttccgtgaagatgagctgcaagaccagcggctacaccttcaccagatacaccatgcactgggtcaagcagcggcctggacaaggactggaatggatcggctacatcaaccccagccggggctacaccaactacaaccagaagttcaaggacaaggccacactgaccaccgacaagagcagcagcacagcctacatgcagctgagcagcctgaccagcgaagatagcgccgtgtactactgcgcccggtactacgacgatcactactgcctggattactggggccagggcacaaccctgacagtgtcatctgtggaaggcggctctggtggcagcggaggttctggtggatctggcggagtggatgacatccagctgacacagagccccgccatcatgagtgcttccccaggcgagaaagtgaccatgacctgtagagccagcagcagcgtgtcctacatgaactggtatcagcagaagtccggcacaagccccaagcggtggatctacgataccagcaaagtggcctccggcgtgccctacagattttctggctctggcagcggcaccagctactccctgacaatcagcagcatggaagccgaggatgccgccacctactactgccagcagtggtccagcaatcccctgacatttggagccggcaccaagctggaactgaagcatcaccaccatcaccac

SEQ ID NO: 2500 - DNA, 1569 bp, Artificial Sequence
  Synthetic Polynucleotide
atggccttaccagtgaccgccttgctcctgccgctggccttgctgctccacgccgccaggccggagatcgtgctgacacagagccctctgagcctgcctgttacacctggcgagcctgccagcatctcctgtagaagctctcagagcctgctgcacagcaacggctacaactacctggactggtatctccagaagcctggacagagcccacagctcctgatctacctgggcgtgaactctgtgtccggcgtgcccgatagattttctggcagcggctctggcaccgacttcaccctgaagatcagcagagtggaagccgaggacgtgggcgtgtactactgtatgcaggccctccagacaccttggacattcggccagggcaccaaggtggaaatcaaaggcggcggaggatctggcggaggtggaagtggcggaggcggatctcaagtgcaactggttcagagcggagccgaagtgaagaaacctggcagcagcgtgaaggtgtcctgcaaagcctctggcggcatcttcagcaaccacgccatctcttgggtccgacaggctcctggacaaggactggaatggatgggcggcatcatccccatcttcggcacagccaattacgcccagaaattccagggcagagtgaccatcaccgccgacgagtctaccagcaccgccttcatggaactgagcagcctgagaagcgaggacaccgccgtgtactattgcgccagagaatgggccgacgtgttcgacatttggggccagggaacaatggtcaccgtgtcctctacgcgtacgcgtggaggtggtggctccgacatcaagctccagcagtctggcgctgagcttgctagacctggcgcttccgtgaagatgagctgcaagaccagcggctacaccttcaccagatacaccatgcactgggtcaagcagcggcctggacaaggactggaatggatcggctacatcaaccccagccggggctacaccaactacaaccagaagttcaaggacaaggccacactgaccaccgacaagagcagcagcacagcctacatgcagctgagcagcctgaccagcgaagatagcgccgtgtactactgcgcccggtactacgacgatcactactgcctggattactggggccagggcacaaccctgacagtgtcatctgtggaaggcggctctggtggcagcggaggttctggtggatctggcggagtggatgacatccagctgacacagagccccgccatcatgagtgcttccccaggcgagaaagtgaccatgacctgtagagccagcagcagcgtgtcctacatgaactggtatcagcagaagtccggcacaagccccaagcggtggatctacgataccagcaaagtggcctccggcgtgccctacagattttctggctctggcagcggcaccagctactccctgacaatcagcagcatggaagccgaggatgccgccacctactactgccagcagtggtccagcaatcccctgacatttggagccggcaccaagctggaactgaagcatcaccaccatcaccac

SEQ ID NO: 2501 - DNA, 1566 bp, Artificial Sequence
  Synthetic Polynucleotide
atggccttaccagtgaccgccttgctcctgccgctggccttgctgctccacgccgccaggccggacatccagatgacacagtctccagccagcctgaccgtgtcactgggacagagagccaccatctcttgcagagccagcgagagcgtggacagctacggcaatagctacctgcactggtatcagcagaagcccggccagcctcctcagctcctgatctacctggcctccaatctggaaagcggcgtgccagccagattttctggcagcggcagcagaaccgacttcaccctgaccattgatcccgtggaagccgatgatgccgccacctactactgccagcagaacaacgaggacccctggacatttggcggaggcaccaaggtggaaatcaaaggcggcggaggatctggcggaggtggaagtggcggaggcggatctgaagttcagctccagcagagcggagccgagcttgtgaaacctggcgcttccgtgaagatgagctgcaaagccttcggctacaccttcaccacctttccaatcgagtggatgaagcagagccacggcaagagcctggaatggatcggcaactttcacccctacaacgaccagaccaagtacaacgaagagttcaagggcagagccaagctgaccatcgacagatccagcagcaccgtgtacctggaactgggcagactgacctccgatgacagcgccgtgtactactgtgccagaggctactactacgccttcgacttttggggccagggcaccacactgacagtgtctagcacgcgtacgcgtggaggtggtggctccgacatcaagctccagcagtctggcgctgagcttgctagacctggcgcttccgtgaagatgagctgcaagaccagcggctacaccttcaccagatacaccatgcactgggtcaagcagcggcctggacaaggactggaatggatcggctacatcaaccccagccggggctacaccaactacaaccagaagttcaaggacaaggccacactgaccaccgacaagagcagcagcacagcctacatgcagctgagcagcctgaccagcgaagatagcgccgtgtactactgcgcccggtactacgacgatcactactgcctggattactggggccagggcacaaccctgacagtgtcatctgtggaaggcggctctggtggcagcggaggttctggtggatctggcggagtggatgacatccagctgacacagagccccgccatcatgagtgcttccccaggcgagaaagtgaccatgacctgtagagccagcagcagcgtgtcctacatgaactggtatcagcagaagtccggcacaagccccaagcggtggatctacgataccagcaaagtggcctccggcgtgccctacagattttctggctctggcagcggcaccagctactccctgacaatcagcagcatggaagccgaggatgccgccacctactactgccagcagtggtccagcaatcccctgacatttggagccggcaccaagctggaactgaagcatcaccaccatcaccac

SEQ ID NO: 2502 - DNA, 1584 bp, Artificial Sequence
  Synthetic Polynucleotide
atggccttaccagtgaccgccttgctcctgccgctggccttgctgctccacgccgccaggccggacatcgtgatgacccagagccccgatagcctggccgtgtctctgggagagagagccaccatcaactgcgagagcagccagagcctgctgaacagcggcaaccagaagaactacctgacctggtatcagcagaagcccggccagccccccaagcccctgatctattgggccagcaccagagaaagcggcgtgcccgatagattcagcggcagcggaagcggcaccgacttcaccctgaccatcagttctcttcaggccgaggacgtggccgtgtactactgccagaacgactacagctacccctacaccttcggccagggcaccaagctggaaatcaagagaggcggaggcggaagtggaggcggaggatctggcggcggaggctctgaagtgcagctggtgcagtctggggccgaagtgaagaagcctggcgagagcctgaagatcagctgcaagggcagcggctacagcttcaccgactactacatgaagtgggccagacagatgcccggcaagggcctggaatggatgggcgacatcatccccagcaacggggccaccttctacaaccagaaattcaagggccaagtgaccatctccgccgacaagagcatcagcaccacctacctccagtggtccagcctgaaggccagcgacaccgccatgtactattgcgccagaagccatctgctgcgggccagttggttcgcctattggggccagggaacaatggtcacagtgtccagcacgcgtacgcgtggaggtggtggctccgacatcaagctccagcagtctggcgctgagcttgctagacctggcgcttccgtgaagatgagctgcaagaccagcggctacaccttcaccagatacaccatgcactgggtcaagcagcggcctggacaaggactggaatggatcggctacatcaaccccagccggggctacaccaactacaaccagaagttcaaggacaaggccacactgaccaccgacaagagcagcagcacagcctacatgcagctgagcagcctgaccagcgaagatagcgccgtgtactactgcgcccggtactacgacgatcactactgcctggattactggggccagggcacaaccctgacagtgtcatctgtggaaggcggctctggtggcagcggaggttctggtggatctggcggagtggatgacatccagctgacacagagccccgccatcatgagtgcttccccaggcgagaaagtgaccatgacctgtagagccagcagcagcgtgtcctacatgaactggtatcagcagaagtccggcacaagccccaagcggtggatctacgataccagcaaagtggcctccggcgtgccctacagattttctggctctggcagcggcaccagctactccctgacaatcagcagcatggaagccgaggatgccgccacctactactgccagcagtggtccagcaatcccctgacatttggagccggcaccaagctggaactgaagcatcaccaccatcaccac

SEQ ID NO: 2503 - DNA, 1569 bp, Artificial Sequence
  Synthetic Polynucleotide
atggccttaccagtgaccgccttgctcctgccgctggccttgctgctccacgccgccaggccggacatcgtgctgacacagagccctgcttctctggccgtgtctctgggacagagagccaccatcagctgtagagccagcgagagcgtggacaactacggcaacaccttcatgcactggtatcagcagaagcccggccagcctcctaagctgctgatctacagagccagcaacctggaaagcggcatccccgccagattttctggcagcggcagcagaaccgacttcaccctgaccatcaatcccgtggaagccgacgacgtggcaacctactactgccagcagagcaacgaggaccctcctacatttggagccggcaccaagctggaactgaaaggcggaggcggaagtggaggcggaggatctggcggcggaggctctcagattcagctggtgcagtctggccccgagctgaagaaacctggcgagacagtgaagatcagctgcaaggccagcggctacatcttcaccaattacggcatgaactgggtcaagcaggcccctggcaagagcttcaagtggatgggctggatcaacacctacaccggcgagagcacatacagcgccgacttcaagggcagattcgccttcagcctggaaaccagcgccagcacagcctacctgcacatcaacgacctgaagaacgaggacaccgccacctacttttgcgccagaagcggcggctacgaccctatggattattggggccagggcaccagcgtgaccgtttcttctacgcgtacgcgtggaggtggtggctccgacatcaagctccagcagtctggcgctgagcttgctagacctggcgcttccgtgaagatgagctgcaagaccagcggctacaccttcaccagatacaccatgcactgggtcaagcagcggcctggacaaggactggaatggatcggctacatcaaccccagccggggctacaccaactacaaccagaagttcaaggacaaggccacactgaccaccgacaagagcagcagcacagcctacatgcagctgagcagcctgaccagcgaagatagcgccgtgtactactgcgcccggtactacgacgatcactactgcctggattactggggccagggcacaaccctgacagtgtcatctgtggaaggcggctctggtggcagcggaggttctggtggatctggcggagtggatgacatccagctgacacagagccccgccatcatgagtgcttccccaggcgagaaagtgaccatgacctgtagagccagcagcagcgtgtcctacatgaactggtatcagcagaagtccggcacaagccccaagcggtggatctacgataccagcaaagtggcctccggcgtgccctacagattttctggctctggcagcggcaccagctactccctgacaatcagcagcatggaagccgaggatgccgccacctactactgccagcagtggtccagcaatcccctgacatttggagccggcaccaagctggaactgaagcatcaccaccatcaccac

SEQ ID NO: 2504 - DNA, 1581 bp, Artificial Sequence
  Synthetic Polynucleotide
atggccttaccagtgaccgccttgctcctgccgctggccttgctgctccacgccgccaggccggacttcgtgatgacacagagccctgatagcctggccgtgtctctcggcgagcgagtgaccatgagctgcaagtctagccagagcctgctgaacagcggcaaccagaagaactacctgacctggtatcagcagaagcccggccagcctcctaagctgctgatctactgggccagcaccagagaaagcggcgtgcccgatagattttctggctctggcagcggcaccgacttcaccctgacaatttctagcctgcaagccgaggacgtggccgtgtactactgccagaacgactacagctacccctacaccttcggccagggcaccaagctggaaatcaaaggcggaggcggaagtggaggcggaggatctggcggcggaggctctgaagtgcaactggttcagagcggagccgagctgaagaaacctggggccagcgtgaaggtgtcctgtaaagccagcggctacacctttaccgactactacatgaaatgggtccgacaggccccaggccagggactcgaatggatcggcgatattatccccagcaacggggccaccttctacaaccagaaattcaagggccgcgtgaccatcaccgtggacaagagcacaagcaccgcctacatggaactgagcagcctgagaagcgaggacaccgccgtgtattattgcgccagaagccatctgctgcgggccagttggttcgcctattggggacagggaaccctggtcaccgttagctctacgcgtacgcgtggaggtggtggctccgacatcaagctccagcagtctggcgctgagcttgctagacctggcgcttccgtgaagatgagctgcaagaccagcggctacaccttcaccagatacaccatgcactgggtcaagcagcggcctggacaaggactggaatggatcggctacatcaaccccagccggggctacaccaactacaaccagaagttcaaggacaaggccacactgaccaccgacaagagcagcagcacagcctacatgcagctgagcagcctgaccagcgaagatagcgccgtgtactactgcgcccggtactacgacgatcactactgcctggattactggggccagggcacaaccctgacagtgtcatctgtggaaggcggctctggtggcagcggaggttctggtggatctggcggagtggatgacatccagctgacacagagccccgccatcatgagtgcttccccaggcgagaaagtgaccatgacctgtagagccagcagcagcgtgtcctacatgaactggtatcagcagaagtccggcacaagccccaagcggtggatctacgataccagcaaagtggcctccggcgtgccctacagattttctggctctggcagcggcaccagctactccctgacaatcagcagcatggaagccgaggatgccgccacctactactgccagcagtggtccagcaatcccctgacatttggagccggcaccaagctggaactgaagcatcaccaccatcaccac

SEQ ID NO: 2505 - DNA, 1581 bp, Artificial Sequence
  Synthetic Polynucleotide
atggccttaccagtgaccgccttgctcctgccgctggccttgctgctccacgccgccaggccggacttcgtgatgacacagagccctgatagcctggccgtgtctctcggcgagcgagtgaccatgagctgcaagtctagccagagcctgctgaacagcggcaaccagaagaactacctgacctggtatcagcagaagcccggccagcctcctaagctgctgatctactgggccagcaccagagaaagcggcgtgcccgatagattttctggctctggcagcggcaccgacttcaccctgacaatttctagcctgcaagccgaggacgtggccgtgtactactgccagaacgactacagctacccctacaccttcggccagggcaccaagctggaaatcaaaggcggaggcggaagtggaggcggaggatctggcggcggaggctctcaagtgcaactggttcagagcggagccgagctgaagaaacctggggccagcgtgaaggtgtcctgtaaagccagcggctacacctttaccgactactacatgaaatgggtccgacaggccccaggccagggactcgaatggatcggcgatattatccccagcaacggggccaccttctacaaccagaaattcaagggccgcgtgaccatcaccgtggacaagagcacaagcaccgcctacatggaactgagcagcctgagaagcgaggacaccgccgtgtattattgcgccagaagccatctgctgcgggccagttggttcgcctattggggacagggaaccctggtcaccgttagctctacgcgtacgcgtggaggtggtggctccgacatcaagctccagcagtctggcgctgagcttgctagacctggcgcttccgtgaagatgagctgcaagaccagcggctacaccttcaccagatacaccatgcactgggtcaagcagcggcctggacaaggactggaatggatcggctacatcaaccccagccggggctacaccaactacaaccagaagttcaaggacaaggccacactgaccaccgacaagagcagcagcacagcctacatgcagctgagcagcctgaccagcgaagatagcgccgtgtactactgcgcccggtactacgacgatcactactgcctggattactggggccagggcacaaccctgacagtgtcatctgtggaaggcggctctggtggcagcggaggttctggtggatctggcggagtggatgacatccagctgacacagagccccgccatcatgagtgcttccccaggcgagaaagtgaccatgacctgtagagccagcagcagcgtgtcctacatgaactggtatcagcagaagtccggcacaagccccaagcggtggatctacgataccagcaaagtggcctccggcgtgccctacagattttctggctctggcagcggcaccagctactccctgacaatcagcagcatggaagccgaggatgccgccacctactactgccagcagtggtccagcaatcccctgacatttggagccggcaccaagctggaactgaagcatcaccaccatcaccac

SEQ ID NO: 2506 - DNA, 1584 bp, Artificial Sequence
  Synthetic Polynucleotide
atggccttaccagtgaccgccttgctcctgccgctggccttgctgctccacgccgccaggccggacatcgtgatgacacagagcccttctagcctggccgtgtctgagggcgagacagtgaccatcaactgcaagagcagccagagcttcctgtctagcggcgacggcaagaattacgtggcctggtatcagtacaagcccggacagagccccaagctgctgatctactgggccagcacaagacagagcggcgtgcccgatagattcatcggctctggcagcggcaccgacttcaccctgacaatctctacagtgcaggccgaggacctggctatctactactgccagcagtattacgacacccctctgacctttggctccggcaccaagctggaaatcaaaggcggaggcggaagtggaggcggaggatctggcggcggaggctctgaagtgaagctgcaagagtctggccccagcctggtgcagagtagccaaacactgagcctgacctgtaccgtgtccggctttagcctgaccagctaccacatccactgggtccgacagacccctggcaaaggactggaatggatgggcgtgatgtggagcgacggcgacaccagctataacagcgccctgaagtcccggctgagcatcagcagagatacaagccagagccaggtgttcctgaagatgaacagcctccagaccgaggacaccgccacctactattgtgccagaggctactacagcagctacctgtacctttggttcgcctattggggccagggcaccctggttacagtcagctctacgcgtacgcgtggaggtggtggctccgacatcaagctccagcagtctggcgctgagcttgctagacctggcgcttccgtgaagatgagctgcaagaccagcggctacaccttcaccagatacaccatgcactgggtcaagcagcggcctggacaaggactggaatggatcggctacatcaaccccagccggggctacaccaactacaaccagaagttcaaggacaaggccacactgaccaccgacaagagcagcagcacagcctacatgcagctgagcagcctgaccagcgaagatagcgccgtgtactactgcgcccggtactacgacgatcactactgcctggattactggggccagggcacaaccctgacagtgtcatctgtggaaggcggctctggtggcagcggaggttctggtggatctggcggagtggatgacatccagctgacacagagccccgccatcatgagtgcttccccaggcgagaaagtgaccatgacctgtagagccagcagcagcgtgtcctacatgaactggtatcagcagaagtccggcacaagccccaagcggtggatctacgataccagcaaagtggcctccggcgtgccctacagattttctggctctggcagcggcaccagctactccctgacaatcagcagcatggaagccgaggatgccgccacctactactgccagcagtggtccagcaatcccctgacatttggagccggcaccaagctggaactgaagcatcaccaccatcaccac

SEQ ID NO: 2507 - DNA, 1596 bp, Artificial Sequence
  Synthetic Polynucleotide
atggccttaccagtgaccgccttgctcctgccgctggccttgctgctccacgccgccaggccggacgtgctgatgacccagacacctgtgtctctgccagtgtctctcggaggccaggtgtccatctcctgtagaagcagccagagcctggtgcactccgacggcgatacctacctgcactggtatctccagaagcctggacagagccctcagctcctgatctaccgggtgtccaacagattcagcggcgtgcccgatagattttccggcagcggctctggcaccgacttcaccctgaagatcagcagagtggaacccgaggacctgggcctgtactactgtctccagaccacacacttcccaccttggacctttggcggaggcaccaagctggaaatgaaaggcggaggcggaagtggaggcggaggatctggcggcggaggctctcaggttcagctccagcagtctggacccgagcttagaaggccaggatctagcgtcagactgagctgcaaggccagcggctaccggatcaaggacttcctgatccactggattaagaacagacccgagcacggcctggaatggatcggatggattgaccctgaggacggcgagactaagtacgcccagaagttccagaccaaggccacactgaccgccgacacctctagcaacaccgcctacatgcaactgagcagcctgaccagcgaggacaccgccacctacttttgtgctagatggggcgacgtgtactacggcctgatgagaggccatgtgatggatgcctggggccagggaacaagcgtgacagtctcttctacgcgtacgcgtggaggtggtggctccgacatcaagctccagcagtctggcgctgagcttgctagacctggcgcttccgtgaagatgagctgcaagaccagcggctacaccttcaccagatacaccatgcactgggtcaagcagcggcctggacaaggactggaatggatcggctacatcaaccccagccggggctacaccaactacaaccagaagttcaaggacaaggccacactgaccaccgacaagagcagcagcacagcctacatgcagctgagcagcctgaccagcgaagatagcgccgtgtactactgcgcccggtactacgacgatcactactgcctggattactggggccagggcacaaccctgacagtgtcatctgtggaaggcggctctggtggcagcggaggttctggtggatctggcggagtggatgacatccagctgacacagagccccgccatcatgagtgcttccccaggcgagaaagtgaccatgacctgtagagccagcagcagcgtgtcctacatgaactggtatcagcagaagtccggcacaagccccaagcggtggatctacgataccagcaaagtggcctccggcgtgccctacagattttctggctctggcagcggcaccagctactccctgacaatcagcagcatggaagccgaggatgccgccacctactactgccagcagtggtccagcaatcccctgacatttggagccggcaccaagctggaactgaagcatcaccaccatcaccac

SEQ ID NO: 2508 - DNA, 1569 bp, Artificial Sequence
  Synthetic Polynucleotide
atggccttaccagtgaccgccttgctcctgccgctggccttgctgctccacgccgccaggccggacatccagatgacccagtctaccagttccctgagtgcatccctcggagacagggtgacgatcagttgcagcgcaagccaagggatcaataactatctgaactggtatcagcagaaaccggacggaacagtcgaactcctgatttattacaccagcacccttcagagtggcgtcccttcccggttcagtggctccggaagcgggaccgattactccctgaccatttctaatctggagccagaggacataggaacgtattattgccagcagtatagtaaactgccacgaacttttggaggggggacgaaactggagatcaaaggcggaggcggaagtggaggcggaggatctggcggcggaggctctcaggtgcaactccagcagtccggaagcgagcttatgatgccaggggcatcagtgaagatcagctgcaaggctactggctacaccttctctaattactggatagagtgggttaaacaaaggccagggcacggcctggaatggatcggcgagatcctgcctgggacaggccgaaccatttataacgagaagttcaaaggcaaggctactttcaccgcagatataagctctaatacagtgcaaatgcagctctcttccctgacaagtgaggatagtgccgtgtattattgcgcacgaagagattactatggaaatttttattacgctatggattattggggtcaaggaacaagtgtgaccgttagcagcacgcgtacgcgtggaggtggtggctccgacatcaagctccagcagtctggcgctgagcttgctagacctggcgcttccgtgaagatgagctgcaagaccagcggctacaccttcaccagatacaccatgcactgggtcaagcagcggcctggacaaggactggaatggatcggctacatcaaccccagccggggctacaccaactacaaccagaagttcaaggacaaggccacactgaccaccgacaagagcagcagcacagcctacatgcagctgagcagcctgaccagcgaagatagcgccgtgtactactgcgcccggtactacgacgatcactactgcctggattactggggccagggcacaaccctgacagtgtcatctgtggaaggcggctctggtggcagcggaggttctggtggatctggcggagtggatgacatccagctgacacagagccccgccatcatgagtgcttccccaggcgagaaagtgaccatgacctgtagagccagcagcagcgtgtcctacatgaactggtatcagcagaagtccggcacaagccccaagcggtggatctacgataccagcaaagtggcctccggcgtgccctacagattttctggctctggcagcggcaccagctactccctgacaatcagcagcatggaagccgaggatgccgccacctactactgccagcagtggtccagcaatcccctgacatttggagccggcaccaagctggaactgaagcatcaccaccatcaccac

SEQ ID NO: 2509 - DNA, 1560 bp, Artificial Sequence
  Synthetic Polynucleotide
atggccttaccagtgaccgccttgctcctgccgctggccttgctgctccacgccgccaggccggacatccagatgacccagagccccagcagcctgtctgccagcgtgggcgacagagtgaccatcacatgcaaggccagccaggacgtgggaatcgccgtggcctggtatcagcagaaacccggcaaggtgcccaagctgctgatctactgggccagcaccagacacaccggcgtgcccgatagattttccggcagcggctccggcaccgacttcaccctgacaatcagctccctccagcccgaggacgtggcaacctactactgccagcagtacagcagctacccctacaccttcggccagggcaccaaggtggaaatcaagggcggaggcggaagtggaggcggaggatctggcggcggaggctctgaagtgcaactggtggaatcaggcggcggactggtgcagcctggcggatctctgagactgagctgtgccgccagcggcttcgacttcagccggtactggatgagctgggtgcgccaggcccctggcaaaggactggaatggatcggcgagatcaaccccgacagcagcaccatcaactacgcccccagcctgaaggacaagttcatcatcagccgggacaacgccaagaacagcctgtacctccagatgaactccctgcgggccgaggacaccgccgtgtactattgcgccagacccgacggcaactactggtacttcgacgtgtggggccagggaaccctcgtgaccgtgtcatctacgcgtacgcgtggaggtggtggctccgacatcaagctccagcagtctggcgctgagcttgctagacctggcgcttccgtgaagatgagctgcaagaccagcggctacaccttcaccagatacaccatgcactgggtcaagcagcggcctggacaaggactggaatggatcggctacatcaaccccagccggggctacaccaactacaaccagaagttcaaggacaaggccacactgaccaccgacaagagcagcagcacagcctacatgcagctgagcagcctgaccagcgaagatagcgccgtgtactactgcgcccggtactacgacgatcactactgcctggattactggggccagggcacaaccctgacagtgtcatctgtggaaggcggctctggtggcagcggaggttctggtggatctggcggagtggatgacatccagctgacacagagccccgccatcatgagtgcttccccaggcgagaaagtgaccatgacctgtagagccagcagcagcgtgtcctacatgaactggtatcagcagaagtccggcacaagccccaagcggtggatctacgataccagcaaagtggcctccggcgtgccctacagattttctggctctggcagcggcaccagctactccctgacaatcagcagcatggaagccgaggatgccgccacctactactgccagcagtggtccagcaatcccctgacatttggagccggcaccaagctggaactgaagcatcaccaccatcaccac

SEQ ID NO: 2510 - DNA, 1563 bp, Artificial Sequence
  Synthetic Polynucleotide
atggccttaccagtgaccgccttgctcctgccgctggccttgctgctccacgccgccaggccggacatcgtgatgacccagagccagaagagcatgagcaccagcgtgggcgacagagtgagcatcacctgcaaggccagccaggacgtgatcaccggcgtggcctggtaccagcagaagcccggccagagccccaagctgctgatctacagcgccagctacagatacaccggcgtgcccgacagattcaccggcagcggcagcggcaccgacttcaccttcaccatcagcaacgtgcaggccgaggacctggccgtgtactactgccagcagcactacagcacccccctgaccttcggcgccggcaccaagctggagctgaagggcggaggcggaagtggaggcggaggatctggcggcggaggctctcaggtgcagctgcagcagcccggcgccgagctggtgagacccggcgccagcgtgaagctgagctgcaaggccagcggctacagcttcaccacctactggatgaactgggtgaagcagagacccggccagggcctggagtggatcggcatgatccaccccagcgacagcgagaccagactgaaccagaagttcaaggacaaggccaccctgaccgtggacaagagcagcagcaccgcctacatgcagctgagcagccccaccagcgaggacagcgccgtgtactactgcgccagaagcaccatgatcgccaccagagccatggactactggggccagggcaccagcgtgaccgtgagcagcacgcgtacgcgtggaggtggtggctccgacatcaagctccagcagtctggcgctgagcttgctagacctggcgcttccgtgaagatgagctgcaagaccagcggctacaccttcaccagatacaccatgcactgggtcaagcagcggcctggacaaggactggaatggatcggctacatcaaccccagccggggctacaccaactacaaccagaagttcaaggacaaggccacactgaccaccgacaagagcagcagcacagcctacatgcagctgagcagcctgaccagcgaagatagcgccgtgtactactgcgcccggtactacgacgatcactactgcctggattactggggccagggcacaaccctgacagtgtcatctgtggaaggcggctctggtggcagcggaggttctggtggatctggcggagtggatgacatccagctgacacagagccccgccatcatgagtgcttccccaggcgagaaagtgaccatgacctgtagagccagcagcagcgtgtcctacatgaactggtatcagcagaagtccggcacaagccccaagcggtggatctacgataccagcaaagtggcctccggcgtgccctacagattttctggctctggcagcggcaccagctactccctgacaatcagcagcatggaagccgaggatgccgccacctactactgccagcagtggtccagcaatcccctgacatttggagccggcaccaagctggaactgaagcatcaccaccatcaccac

SEQ ID NO: 2511 - DNA, 1578 bp, Artificial Sequence
  Synthetic Polynucleotide
atggccttaccagtgaccgccttgctcctgccgctggccttgctgctccacgccgccaggccggacgacatccaaatgacacagagtccttctagtttgagtgcgagcgtgggggacagggtgaccattacctgcagggccagccagagcataagctcataccttaattggtaccagcaaaaaccaggtaaggcccctaagctcctgatctacgcggcctcttcacttcaatctggggtcccttcccgcttcagtggctccggcagcggcaccgacttcacgctcactatatcaagtctgcagcctgaggatctcgccacctattactgtcaacaaagttattccacccctttcacctttggaccgggcacgaaagtggatattaagggcggaggcggaagtggaggcggaggatctggcggcggaggctctgtgcacgaggtccagcttgtgcagtccggggcagaggtcaagaagcctggttctagcgtaaaagtgagttgcaaagcctcaggtgggacattttcatcctacgcgatcagttgggttagacaggctcctggtcaagggctggaatggatgggcggaattattccaatcttcggaacagcgaattacgcgcagaagttccagggtagagtaaccatcactgctgacaagtccacctccaccgcatacatggaattgtctagtctccggagcgaggatacggcggtgtattattgtgctacgttcgccctgtttggcttccgcgaacaggctttcgacatctgggggcagggcacgacagtcacggttagtagtacgcgtacgcgtggaggtggtggctccgacatcaagctccagcagtctggcgctgagcttgctagacctggcgcttccgtgaagatgagctgcaagaccagcggctacaccttcaccagatacaccatgcactgggtcaagcagcggcctggacaaggactggaatggatcggctacatcaaccccagccggggctacaccaactacaaccagaagttcaaggacaaggccacactgaccaccgacaagagcagcagcacagcctacatgcagctgagcagcctgaccagcgaagatagcgccgtgtactactgcgcccggtactacgacgatcactactgcctggattactggggccagggcacaaccctgacagtgtcatctgtggaaggcggctctggtggcagcggaggttctggtggatctggcggagtggatgacatccagctgacacagagccccgccatcatgagtgcttccccaggcgagaaagtgaccatgacctgtagagccagcagcagcgtgtcctacatgaactggtatcagcagaagtccggcacaagccccaagcggtggatctacgataccagcaaagtggcctccggcgtgccctacagattttctggctctggcagcggcaccagctactccctgacaatcagcagcatggaagccgaggatgccgccacctactactgccagcagtggtccagcaatcccctgacatttggagccggcaccaagctggaactgaagcatcaccaccatcaccac

SEQ ID NO: 2512 - DNA, 1563 bp, Artificial Sequence
  Synthetic Polynucleotide
atggccttaccagtgaccgccttgctcctgccgctggccttgctgctccacgccgccaggccggaccagatcgtgctgacccagtcccccgctattatgtccgcatcaccgggcgaaaaagtgacgatctcctgtagcgcttcatctagcgtctcctacatgtattggtatcaacagaaacctgggtctagcccaaagccgtggatctacagaaccagtaaccttgccagtggggtgccagcccgcttcagcggtagtggcagtggaacttcctatagcctcacaataagcaacatggaggctgaagatgccgctgcctattactgccagcagtaccacagttacccaaccacgttcggcgggggaactaagctcgaagtaaaaggcggaggcggaagtggaggcggaggatctggcggcggaggctctgaggtgcagctggtggaatctgggggcggcctggtccaacctaagggatcactcaagctctcttgtgcggccagcggattctctttcaatacctatgctatgaattgggtgagacaggcgcccggaaagggcctcgaatggatagcccatatccggtcaaaatcaaacaatttcgcaacctactatgcggactccgtgaaggaccgattttccatctcccgagatgcctccgagaatattctgttcctgcagatgaataacctcaagacagaggacaccgccatgtactactgtgtgcgccagggcggtgactttcccatggattactgggggcaggggaccagcgtgaccgtgagctctacgcgtacgcgtggaggtggtggctccgacatcaagctccagcagtctggcgctgagcttgctagacctggcgcttccgtgaagatgagctgcaagaccagcggctacaccttcaccagatacaccatgcactgggtcaagcagcggcctggacaaggactggaatggatcggctacatcaaccccagccggggctacaccaactacaaccagaagttcaaggacaaggccacactgaccaccgacaagagcagcagcacagcctacatgcagctgagcagcctgaccagcgaagatagcgccgtgtactactgcgcccggtactacgacgatcactactgcctggattactggggccagggcacaaccctgacagtgtcatctgtggaaggcggctctggtggcagcggaggttctggtggatctggcggagtggatgacatccagctgacacagagccccgccatcatgagtgcttccccaggcgagaaagtgaccatgacctgtagagccagcagcagcgtgtcctacatgaactggtatcagcagaagtccggcacaagccccaagcggtggatctacgataccagcaaagtggcctccggcgtgccctacagattttctggctctggcagcggcaccagctactccctgacaatcagcagcatggaagccgaggatgccgccacctactactgccagcagtggtccagcaatcccctgacatttggagccggcaccaagctggaactgaagcatcaccaccatcaccac

SEQ ID NO: 2513 - DNA, 1560 bp, Artificial Sequence
  Synthetic Polynucleotide
atggccttaccagtgaccgccttgctcctgccgctggccttgctgctccacgccgccaggccggacgacatccagatgacccagagcagcagcagcttcagcgtgagcctgggcgacagagtgaccatcacctgcatggccagcgaggacatctacatcagactggcctggtaccagcagaagcccggcaacgcccccagactgctgatcagcgccgccaccagcctggagaccggcgtgcccagcagattcagcggcagcggcagcggcaaggactacaccctgagcatcaccagcctgcagaccgaggacgtgggcacctactactgccagcagtactggagcagcccctggaccttcggcggcggcaccaagctggagatcaacggcggaggcggaagtggaggcggaggatctggcggcggaggctctgacgtgcagctgcaggagagcggccccggcctggtgaagcccagccagagcctgagcctgacctgcaccgtgaccggctacagcatcaccagcgactacacctggaactggatcagacagttccccggcaacaagctggagtggatgggctacatcacctacagcggcagcaccagctacaaccccagcctgaagagcagaaacagcatcaccagagacaccagcaagaaccagttcttcctgcagctgaacagcgtgaccaccgaggacaccgccacctactactgcgccagactgggcagaagatacacaatggactactggggccagggcaccagcgtgaccgtgagcagcacgcgtacgcgtggaggtggtggctccgacatcaagctccagcagtctggcgctgagcttgctagacctggcgcttccgtgaagatgagctgcaagaccagcggctacaccttcaccagatacaccatgcactgggtcaagcagcggcctggacaaggactggaatggatcggctacatcaaccccagccggggctacaccaactacaaccagaagttcaaggacaaggccacactgaccaccgacaagagcagcagcacagcctacatgcagctgagcagcctgaccagcgaagatagcgccgtgtactactgcgcccggtactacgacgatcactactgcctggattactggggccagggcacaaccctgacagtgtcatctgtggaaggcggctctggtggcagcggaggttctggtggatctggcggagtggatgacatccagctgacacagagccccgccatcatgagtgcttccccaggcgagaaagtgaccatgacctgtagagccagcagcagcgtgtcctacatgaactggtatcagcagaagtccggcacaagccccaagcggtggatctacgataccagcaaagtggcctccggcgtgccctacagattttctggctctggcagcggcaccagctactccctgacaatcagcagcatggaagccgaggatgccgccacctactactgccagcagtggtccagcaatcccctgacatttggagccggcaccaagctggaactgaagcatcaccaccatcaccac

SEQ ID NO: 2514 - DNA, 1560 bp, Artificial Sequence
  Synthetic Polynucleotide
atggccctgcctgtgacagctctgctgctgcctctggcactgctgctgcacgccgccagacctgacatccagatgacccagagcagcagcagcttcagcgtgtccctgggcgacagagtgaccatcacatgcaaggccagcgaggacatctacatccggctggcctggtatcagcagaagcccggcaacgcccccagactgctgattagcgccgccacctctctggaaaccggcatccccagcagattctccggctctggcagcggcgaggactacaccctgacaatcaccagcctccagaccgaggacgtggcaacctactactgccagcagtattggaccaccccctggacctttggcggaggcaccaagctggaaatcaagagaggcggaggcggaagtggaggcggaggatctggcggcggaggctctgatgtgcagctccaggaatctggccccggactcgtgaagcctagccagagcctgagcctgacatgcaccgtgaccggctacagcatcaccatcgactacacctggaactggatcagacagttccccggcaacaaactggaatggatgggctacatcacctacagcggcagcaccgactacaaccccagcctgaagtccagaagctccatcaccagagacacctctatgaaccagttcttcttgcagctgaacagcgtgaccaccgaggacaccgccacctactattgcgccagactgggcagaagatacgccctggactattggggccagggcaccagcgtgacagtgtcctctacgcgtacgcgtggaggtggtggctccgacatcaagctccagcagtctggcgctgagcttgctagacctggcgcttccgtgaagatgagctgcaagaccagcggctacaccttcaccagatacaccatgcactgggtcaagcagcggcctggacaaggactggaatggatcggctacatcaaccccagccggggctacaccaactacaaccagaagttcaaggacaaggccacactgaccaccgacaagagcagcagcacagcctacatgcagctgagcagcctgaccagcgaagatagcgccgtgtactactgcgcccggtactacgacgatcactactgcctggattactggggccagggcacaaccctgacagtgtcatctgtggaaggcggctctggtggcagcggaggttctggtggatctggcggagtggatgacatccagctgacacagagccccgccatcatgagtgcttccccaggcgagaaagtgaccatgacctgtagagccagcagcagcgtgtcctacatgaactggtatcagcagaagtccggcacaagccccaagcggtggatctacgataccagcaaagtggcctccggcgtgccctacagattttctggctctggcagcggcaccagctactccctgacaatcagcagcatggaagccgaggatgccgccacctactactgccagcagtggtccagcaatcccctgacatttggagccggcaccaagctggaactgaagcatcaccaccatcaccac

SEQ ID NO: 2515 - DNA, 1557 bp, Artificial Sequence
  Synthetic Polynucleotide
atggccttaccagtgaccgccttgctcctgccgctggccttgctgctccacgccgccaggccggacgtggtcatgacacagagcccttctagcctgtctgccagcgtgggcgacagagtgaccatcacctgtatggcctccgaggacatctacatccggctggcctggtatcagcagaagcctggaaacgcccctaagctgctgatctacgccgccacctctctggaaacaggcgtgccaagcagattttccggcagcggctctggcaccgatttcaccctgacaatatccagcctccagcctgaggacttcgccacctactactgccagcagtattggagcagcccctggacatttggcggaggcaccaaggtggaaatcaaaggcggaggcggaagtggaggcggaggatctggcggcggaggctctcaggttcagctgcaagagtctggccccggactggtcaagcctagccaaacactgagcctgacctgtaccgtgtccggctacagcatcaccagcgactacacctggaactggatcagacagcctcctggcaacggactggaatggatcggctacatcacctacagcggcagcaccagctacaaccccagcctgaaaagccgggtgctgatctccgtggacaccagcaagaatcaggtgtccctgaagctgagcagcgtgacagccgctgataccgccgtgtactactgtgccagactggggagaagatacacaatggactactggggccagggcaccaccgtgacagtttcttctacgcgtacgcgtggaggtggtggctccgacatcaagctccagcagtctggcgctgagcttgctagacctggcgcttccgtgaagatgagctgcaagaccagcggctacaccttcaccagatacaccatgcactgggtcaagcagcggcctggacaaggactggaatggatcggctacatcaaccccagccggggctacaccaactacaaccagaagttcaaggacaaggccacactgaccaccgacaagagcagcagcacagcctacatgcagctgagcagcctgaccagcgaagatagcgccgtgtactactgcgcccggtactacgacgatcactactgcctggattactggggccagggcacaaccctgacagtgtcatctgtggaaggcggctctggtggcagcggaggttctggtggatctggcggagtggatgacatccagctgacacagagccccgccatcatgagtgcttccccaggcgagaaagtgaccatgacctgtagagccagcagcagcgtgtcctacatgaactggtatcagcagaagtccggcacaagccccaagcggtggatctacgataccagcaaagtggcctccggcgtgccctacagattttctggctctggcagcggcaccagctactccctgacaatcagcagcatggaagccgaggatgccgccacctactactgccagcagtggtccagcaatcccctgacatttggagccggcaccaagctggaactgaagcatcaccaccatcaccac

SEQ ID NO: 2516 - DNA, 1569 bp, Artificial Sequence
  Synthetic Polynucleotide
atggccttaccagtgaccgccttgctcctgccgctggccttgctgctccacgccgccaggccggagatcgtgctgacacagtctcccgccacactgtcactgtctccaggcgaaagagccacactgagctgtagcgccagcagcagcgtgtcctacatgtactggtatcagcagaagcccggacaggcccctagactgctgatctacagaaccagcaacctggcctctggcatccccgccagattttctggctctggcagcggcaccgatttcaccctgaccataagcagcctggaacctgaggacttcgccgtgtactactgccagcagtaccacagctaccccaccacctttggacagggcaccaaggtggaaatcaagcggacagttggcggaggcggaagtggaggcggaggatctggcggcggaggctctgaagtgcagctggttgaatcaggtggcggcctggttcaacctggcggatctctgagactgtcttgtgccgccagcggcttcagcttcaacacctacgccatgaactgggtccgacaggctcctggcaaaggactggaatgggtgtcccacatcagaagcaagagcaacaacttcgccacctactacgccgacagcgtgaaggacagattcaccatcagccgggacaacgccaagaacagcctgtacctccagatgaactccctgagagccgaggacaccgccgtgtattattgcgccagacaaggcggcgacttccctatggattattggggccagggcaccctggtcaccgtttcttctacgcgtacgcgtggaggtggtggctccgacatcaagctccagcagtctggcgctgagcttgctagacctggcgcttccgtgaagatgagctgcaagaccagcggctacaccttcaccagatacaccatgcactgggtcaagcagcggcctggacaaggactggaatggatcggctacatcaaccccagccggggctacaccaactacaaccagaagttcaaggacaaggccacactgaccaccgacaagagcagcagcacagcctacatgcagctgagcagcctgaccagcgaagatagcgccgtgtactactgcgcccggtactacgacgatcactactgcctggattactggggccagggcacaaccctgacagtgtcatctgtggaaggcggctctggtggcagcggaggttctggtggatctggcggagtggatgacatccagctgacacagagccccgccatcatgagtgcttccccaggcgagaaagtgaccatgacctgtagagccagcagcagcgtgtcctacatgaactggtatcagcagaagtccggcacaagccccaagcggtggatctacgataccagcaaagtggcctccggcgtgccctacagattttctggctctggcagcggcaccagctactccctgacaatcagcagcatggaagccgaggatgccgccacctactactgccagcagtggtccagcaatcccctgacatttggagccggcaccaagctggaactgaagcatcaccaccatcaccac

SEQ ID NO: 2517 - DNA, 1557 bp, Artificial Sequence
  Synthetic Polynucleotide
atggccttaccagtgaccgccttgctcctgccgctggccttgctgctccacgccgccaggccggacgtggtcatgacacagagcccttctagcctgtctgccagcgtgggcgacagagtgaccatcacctgtaaagccagcgaggacatctacatccggctggcctggtatcagcagaagcctggaaaggcccctaagctgctgatctacgccgccacctctctggaaacaggcgtgccaagcagattttccggcagcggctctggcaccgatttcaccctgacaatatccagcctccagcctgaggacttcgccacctactactgccagcagtattggaccacaccttggacctttggcggaggcaccaaggtggaaatcaaaggcggaggcggaagtggaggcggaggatctggcggcggaggctctcaggtgcagctccaagagtctggccctggactggtcaagcctagccagacactgagcctgacctgtaccgtgtccggctacagcatcaccatcgactacacctggaactggatcagacagcctcctggcaaaggactggaatggatcggctacatcacctacagcggcagcaccgactacaaccccagcctgaaaagccgggtgctgatctccgtggacaccagcaagaatcaggtgtccctgaagctgagcagcgtgacagccgctgataccgccgtgtactactgtgccagactgggcagaagatacgccctggattattggggccagggcaccaccgtgacagtgtcatctacgcgtacgcgtggaggtggtggctccgacatcaagctccagcagtctggcgctgagcttgctagacctggcgcttccgtgaagatgagctgcaagaccagcggctacaccttcaccagatacaccatgcactgggtcaagcagcggcctggacaaggactggaatggatcggctacatcaaccccagccggggctacaccaactacaaccagaagttcaaggacaaggccacactgaccaccgacaagagcagcagcacagcctacatgcagctgagcagcctgaccagcgaagatagcgccgtgtactactgcgcccggtactacgacgatcactactgcctggattactggggccagggcacaaccctgacagtgtcatctgtggaaggcggctctggtggcagcggaggttctggtggatctggcggagtggatgacatccagctgacacagagccccgccatcatgagtgcttccccaggcgagaaagtgaccatgacctgtagagccagcagcagcgtgtcctacatgaactggtatcagcagaagtccggcacaagccccaagcggtggatctacgataccagcaaagtggcctccggcgtgccctacagattttctggctctggcagcggcaccagctactccctgacaatcagcagcatggaagccgaggatgccgccacctactactgccagcagtggtccagcaatcccctgacatttggagccggcaccaagctggaactgaagcatcaccaccatcaccac

SEQ ID NO: 2518 - DNA, 1560 bp, Artificial Sequence
  Synthetic Polynucleotide
atggccttaccagtgaccgccttgctcctgccgctggccttgctgctccacgccgccaggccggacatccagatgacacagtctccggcgtcactgtccgcctccgtgggggagactgtgactattatttgtagggcatcagttaacatctactcttatttggcctggtaccagcagaagcaaggcaagagtcctcagctgctggtgtataatgcgaagatcctggcagagggcgtgccgagccggttctccggcagcggctcaggtacccaattttccctcaagatcaattcactgcagccagaggactttggcagttactattgtcaacaccactacggcacattcactttcgggtccggtacaaaattggagattaagcgaggcggaggcggaagtggaggcggaggatctggcggcggaggctctcaggtacagttgaaagaaagcgggcctggactggtagcgccttcccaatctctctccatcacgtgcaccatctctggcttctccctgacttcctatggagttcactgggtgaggcagccccccggcaagggactggaatggctggtcgtcatctggtccgacgggtccacaacctacaactccgctctgaaaagtcggctctctatttctaaagataatagcaagagccaggtgtttctgaaaatgaactctctgcagaccgatgatacggccatttactactgcgcttcacactatggctcaaccttggcattcgcttcctggggccacggaacactggtgaccgtttccgcagccacgcgtacgcgtggaggtggtggctccgacatcaagctccagcagtctggcgctgagcttgctagacctggcgcttccgtgaagatgagctgcaagaccagcggctacaccttcaccagatacaccatgcactgggtcaagcagcggcctggacaaggactggaatggatcggctacatcaaccccagccggggctacaccaactacaaccagaagttcaaggacaaggccacactgaccaccgacaagagcagcagcacagcctacatgcagctgagcagcctgaccagcgaagatagcgccgtgtactactgcgcccggtactacgacgatcactactgcctggattactggggccagggcacaaccctgacagtgtcatctgtggaaggcggctctggtggcagcggaggttctggtggatctggcggagtggatgacatccagctgacacagagccccgccatcatgagtgcttccccaggcgagaaagtgaccatgacctgtagagccagcagcagcgtgtcctacatgaactggtatcagcagaagtccggcacaagccccaagcggtggatctacgataccagcaaagtggcctccggcgtgccctacagattttctggctctggcagcggcaccagctactccctgacaatcagcagcatggaagccgaggatgccgccacctactactgccagcagtggtccagcaatcccctgacatttggagccggcaccaagctggaactgaagcatcaccaccatcaccac

SEQ ID NO: 2519 - DNA, 1584 bp, Artificial Sequence
  Synthetic Polynucleotide
atggccttaccagtgaccgccttgctcctgccgctggccttgctgctccacgccgccaggccggacattgtgatgacccagtctcacaaattcatgtccacatcagtaggagacagggtcagcgtcacctgcaaggccagtcagaatgtgggtaataatgtagcctggtatcaacagaaaccagggcaatctcctaaagtactgatttactcggcatcctaccggtacagtggagtccctgatcgcttcacaggcagtggatctgggacagatttcactctcaccatcagtaatgtgcagtctgaagacttggcagagtatttctgtcagcaatataacacctatccattcacgttcggctcggggacaaagttggaaataaaaggcggaggcggaagtggaggcggaggatctggcggcggaggctctgaggtacagctggaggaaagcggtggaggactggtgcaacctggagggtctatgaagctctcttgcgtagcttctgggttcacgttctccaattactggatgaactgggtgcggcagtcccccgagaaaggcctggaatgggtagcagaaattcggttcaagtcccataactatgctacacactttgccgagtctgtcaaaggccggttcactattagtcgagacgacagcaagtcttcagtctacctgcagatgaataacttgcgggcagaggacacaggtatctactactgcaccaggagaatcggcaactccgactatgactggtggtactttgacgtctggggagcaggcaccagcgtgacggtgagttcagcctcaacgcgtacgcgtggaggtggtggctccgacatcaagctccagcagtctggcgctgagcttgctagacctggcgcttccgtgaagatgagctgcaagaccagcggctacaccttcaccagatacaccatgcactgggtcaagcagcggcctggacaaggactggaatggatcggctacatcaaccccagccggggctacaccaactacaaccagaagttcaaggacaaggccacactgaccaccgacaagagcagcagcacagcctacatgcagctgagcagcctgaccagcgaagatagcgccgtgtactactgcgcccggtactacgacgatcactactgcctggattactggggccagggcacaaccctgacagtgtcatctgtggaaggcggctctggtggcagcggaggttctggtggatctggcggagtggatgacatccagctgacacagagccccgccatcatgagtgcttccccaggcgagaaagtgaccatgacctgtagagccagcagcagcgtgtcctacatgaactggtatcagcagaagtccggcacaagccccaagcggtggatctacgataccagcaaagtggcctccggcgtgccctacagattttctggctctggcagcggcaccagctactccctgacaatcagcagcatggaagccgaggatgccgccacctactactgccagcagtggtccagcaatcccctgacatttggagccggcaccaagctggaactgaagcatcaccaccatcaccac

SEQ ID NO: 2520 - DNA, 1572 bp, Artificial Sequence
  Synthetic Polynucleotide
atggccttaccagtgaccgccttgctcctgccgctggccttgctgctccacgccgccaggccggacatcgtgatgacccagagccccgatagcctggccgtgtctctgggagagagagccaccatcaactgccgggccagcaagagcgtgtccaccagcggctacagcttcatgcactggtatcagcagaagcccggccagccccccaagctgctgatctacctggcctccaacctggaaagcggcgtgcccgatagattcagcggcagcggctctggcaccgacttcaccctgaccatcagttctcttcaggccgaggacgtggccgtgtactactgccagcacagcagagaggtgccctggacattcggccagggcacaaaggtggaaatcaagcggggcggaggcggaagtggaggcggaggatctggcggcggaggctctcaggtgcagctggtgcagtctggggccgaagtgaagaaacctggggccagcgtgaaggtgtcctgcaaggccagcggatacacctttaccaactacggcatgaactgggtgcgccaggcccctggacagggcctggaatggatgggctggatcaacacctacaccggcgagcccacatacgccgacgccttcaagggcagattcgccttcagcctggacaccagcacctccaccgcctacctccagatcaacagcctgcggagcgacgacaccgccgtgtattattgcgccagagattacggcgactacgggatggactattggggccagggaaccaccgtgaccgtgtcctctacgcgtacgcgtggaggtggtggctccgacatcaagctccagcagtctggcgctgagcttgctagacctggcgcttccgtgaagatgagctgcaagaccagcggctacaccttcaccagatacaccatgcactgggtcaagcagcggcctggacaaggactggaatggatcggctacatcaaccccagccggggctacaccaactacaaccagaagttcaaggacaaggccacactgaccaccgacaagagcagcagcacagcctacatgcagctgagcagcctgaccagcgaagatagcgccgtgtactactgcgcccggtactacgacgatcactactgcctggattactggggccagggcacaaccctgacagtgtcatctgtggaaggcggctctggtggcagcggaggttctggtggatctggcggagtggatgacatccagctgacacagagccccgccatcatgagtgcttccccaggcgagaaagtgaccatgacctgtagagccagcagcagcgtgtcctacatgaactggtatcagcagaagtccggcacaagccccaagcggtggatctacgataccagcaaagtggcctccggcgtgccctacagattttctggctctggcagcggcaccagctactccctgacaatcagcagcatggaagccgaggatgccgccacctactactgccagcagtggtccagcaatcccctgacatttggagccggcaccaagctggaactgaagcatcaccaccatcaccac

SEQ ID NO: 2521 - DNA, 1560 bp, Artificial Sequence
  Synthetic Polynucleotide
atggccttaccagtgaccgccttgctcctgccgctggccttgctgctccacgccgccaggccggacatcgtgatgacccagacccccctgaccctgagcgtgacaatcggacagcctgccagcatctcctgcaagagcagccagagcctgctggacagcgacggcaagacctacctgaactggctgctgcagaggccaggccagagccccgagagactgatctacctggtgtccaagctggactccggcgtgcccgatagattcacaggcagcggctccggcaccgacttcaccctgaagatcagccgggtggaagccgaggacctgggcgtgtactgttgttggcagggcacccacttcccttacaccttcggcggagggaccaaggtggaaatcaagggcggcggaggcggaagtggaggcggaggatctggcggcggaggctctcaggtgcaactgcagcagcctggcgctgaacttgtgcggccaggcgcctctgtgaagctgagctgtaaagccagcggctacaccttcaccagctactggatgaactgggtcaagcagcgcccaggccagggcctggaatggatcggaatgatcgaccccagcgacagcgagacacactacaaccacatcttcaaggacaaggccaccctgaccgtggacaagtccagcagcacagcctacctgcaactgtccagcctgaccagcgaggacagcgccgtgtactactgcgcccggaacctgtatctgtggggccagggaacaagcgtgaccgtgtctagcacgcgtacgcgtggaggtggtggctccgacatcaagctccagcagtctggcgctgagcttgctagacctggcgcttccgtgaagatgagctgcaagaccagcggctacaccttcaccagatacaccatgcactgggtcaagcagcggcctggacaaggactggaatggatcggctacatcaaccccagccggggctacaccaactacaaccagaagttcaaggacaaggccacactgaccaccgacaagagcagcagcacagcctacatgcagctgagcagcctgaccagcgaagatagcgccgtgtactactgcgcccggtactacgacgatcactactgcctggattactggggccagggcacaaccctgacagtgtcatctgtggaaggcggctctggtggcagcggaggttctggtggatctggcggagtggatgacatccagctgacacagagccccgccatcatgagtgcttccccaggcgagaaagtgaccatgacctgtagagccagcagcagcgtgtcctacatgaactggtatcagcagaagtccggcacaagccccaagcggtggatctacgataccagcaaagtggcctccggcgtgccctacagattttctggctctggcagcggcaccagctactccctgacaatcagcagcatggaagccgaggatgccgccacctactactgccagcagtggtccagcaatcccctgacatttggagccggcaccaagctggaactgaagcatcaccaccatcaccac

SEQ ID NO: 2522 - DNA, 1554 bp, Artificial Sequence
  Synthetic Polynucleotide
atggccttaccagtgaccgccttgctcctgccgctggccttgctgctccacgccgccaggccggacatccagatgacccagagccctgccagcctgtccgtgtctgtgggcgagacagtgaccatcacctgtcgggccagcgagaacatctacagcaacctggcctggtatcagcagaagcagggcaagagcccccaactgctggtgtacgccgccaccaatctggccgatggcgtgcccagcagattttccggctctggcagcggcacccagtacagcctgaagatcaacagcctccagagcgaggacttcggcagctactactgccagcacttctggggcacctggacctttggaggaggcaccaccctggaaatcaagggcggaggcggaagtggaggcggaggatctggcggcggaggctctgaagtgcaactccagcagagcggccctgagcttgtgaagcctggcgcttccgtgaagatgagctgcaaggccagcggctacaccttcaccgactactacatgaagtggatgaagcagagccacggcaagtccctggaatggatcggcgacatcaaccccaacaacggcggcaccacctacaaccagaagttcaagggcaaggccaccctgaccgtggacaagagcagcagcaccgcctacatgcaactgaacagcctgaccagcgaggacagcgccgtgtactactgcgccagagactacggctacggctatttcgactactggggccagggcacaaccctgacagtgtcctctacgcgtacgcgtggaggtggtggctccgacatcaagctccagcagtctggcgctgagcttgctagacctggcgcttccgtgaagatgagctgcaagaccagcggctacaccttcaccagatacaccatgcactgggtcaagcagcggcctggacaaggactggaatggatcggctacatcaaccccagccggggctacaccaactacaaccagaagttcaaggacaaggccacactgaccaccgacaagagcagcagcacagcctacatgcagctgagcagcctgaccagcgaagatagcgccgtgtactactgcgcccggtactacgacgatcactactgcctggattactggggccagggcacaaccctgacagtgtcatctgtggaaggcggctctggtggcagcggaggttctggtggatctggcggagtggatgacatccagctgacacagagccccgccatcatgagtgcttccccaggcgagaaagtgaccatgacctgtagagccagcagcagcgtgtcctacatgaactggtatcagcagaagtccggcacaagccccaagcggtggatctacgataccagcaaagtggcctccggcgtgccctacagattttctggctctggcagcggcaccagctactccctgacaatcagcagcatggaagccgaggatgccgccacctactactgccagcagtggtccagcaatcccctgacatttggagccggcaccaagctggaactgaagcatcaccaccatcaccac

SEQ ID NO: 2523 - DNA, 1566 bp, Artificial Sequence
  Synthetic Polynucleotide
atggccttaccagtgaccgccttgctcctgccgctggccttgctgctccacgccgccaggccgcagtctgtgctgacacagcctccatctgcctctggcacacctggacagagagtgaccatcagctgtagcggcagcagaagcaacgtcggcggcaactacgtgttctggtatcagcaggtcccaggcgctacccctaagctgctgatctacagaagcaatcagcggcctagcggcgtgcccgatagatttgccggaagcaagagcggcagctctgccagccttgccatctctggactgagaagcgaggacgaggccgactactactgtgccacctgggatgatagcctgagcggcttcgtgtttggcaccggcaccaaagtgacagtgcttggtggcggaggcggaagtggaggcggaggatctggcggcggaggctctgaagttcagctggttgaatctggcggcggactggttaagcctggcggatctctgagactgtcttgtgccgccagcggcttcaccttcagcgattactacatgagctggatcagacaggcccctggcaaaggactggaatgggtgtcctacatcagcagcagcggctccaccatctactacgccgatagcgtgaagggcagattcaccatcagccgggacaacgccaagaacagcctgtacctccagatgaactccctgagagccgaggacaccgccgtgtactattgcgccagaggctacggcaaagcctacgatcaatggggccagggcacactggtcaccgtttcttctacgcgtacgcgtggaggtggtggctccgacatcaagctccagcagtctggcgctgagcttgctagacctggcgcttccgtgaagatgagctgcaagaccagcggctacaccttcaccagatacaccatgcactgggtcaagcagcggcctggacaaggactggaatggatcggctacatcaaccccagccggggctacaccaactacaaccagaagttcaaggacaaggccacactgaccaccgacaagagcagcagcacagcctacatgcagctgagcagcctgaccagcgaagatagcgccgtgtactactgcgcccggtactacgacgatcactactgcctggattactggggccagggcacaaccctgacagtgtcatctgtggaaggcggctctggtggcagcggaggttctggtggatctggcggagtggatgacatccagctgacacagagccccgccatcatgagtgcttccccaggcgagaaagtgaccatgacctgtagagccagcagcagcgtgtcctacatgaactggtatcagcagaagtccggcacaagccccaagcggtggatctacgataccagcaaagtggcctccggcgtgccctacagattttctggctctggcagcggcaccagctactccctgacaatcagcagcatggaagccgaggatgccgccacctactactgccagcagtggtccagcaatcccctgacatttggagccggcaccaagctggaactgaagcatcaccaccatcaccac

SEQ ID NO: 2524 - DNA, 1563 bp, Artificial Sequence
  Synthetic Polynucleotide
atggccttaccagtgaccgccttgctcctgccgctggccttgctgctccacgccgccaggccgcagtctgtggtcacacagccacctagcatgtctgccgctccaggccagcaagtgaccatctcttgtagcggcggcaacagcaacatcgagcggaactacgtgtcctggtatctgcaactgcctggcacagcccctaagctggtcatcttcgacaacgacagacggcccagcggcatccccgatagattttctggcagcaagagcggcaccagcgccacactgggaattaccggacttcagacaggcgacgaggccgactactactgtggcacatgggactctagcctgagaggctgggttttcggcggaggcacaaagctgacagtgcttggtggcggaggcggaagtggaggcggaggatctggcggcggaggctctgaagtgcagctcgttgagtctggcggcggactgattcaacctggcggaagcctgagactgagctgtgccgcttccggcttcaccttcagcaactacgccatgaactgggttcgacaggcccctggcaaaggactggaatgggtgtccaccatcaacggcagaggcagcagcaccatctacgccgattctgtgaagggcagattcaccatcagccgggacaacagcaagaacaccctgtacctccagatgaactccctgagagccgaggacaccgccacctattactgtgcccggtacatcagcagaggactgggcgattcttggggccagggcacactggttacagtgacgcgtacgcgtggaggtggtggctccgacatcaagctccagcagtctggcgctgagcttgctagacctggcgcttccgtgaagatgagctgcaagaccagcggctacaccttcaccagatacaccatgcactgggtcaagcagcggcctggacaaggactggaatggatcggctacatcaaccccagccggggctacaccaactacaaccagaagttcaaggacaaggccacactgaccaccgacaagagcagcagcacagcctacatgcagctgagcagcctgaccagcgaagatagcgccgtgtactactgcgcccggtactacgacgatcactactgcctggattactggggccagggcacaaccctgacagtgtcatctgtggaaggcggctctggtggcagcggaggttctggtggatctggcggagtggatgacatccagctgacacagagccccgccatcatgagtgcttccccaggcgagaaagtgaccatgacctgtagagccagcagcagcgtgtcctacatgaactggtatcagcagaagtccggcacaagccccaagcggtggatctacgataccagcaaagtggcctccggcgtgccctacagattttctggctctggcagcggcaccagctactccctgacaatcagcagcatggaagccgaggatgccgccacctactactgccagcagtggtccagcaatcccctgacatttggagccggcaccaagctggaactgaagcatcaccaccatcaccac

SEQ ID NO: 2525 - DNA, 1728 bp, Artificial Sequence
  Synthetic Polynucleotide
atggccttaccagtgaccgccttgctcctgccgctggccttgctgctccacgccgccaggccggacatcgtgctgacccagagccctctgagcctggccgtgtctctgggacagcctgccatcatcagctgcaaggccagccagagcgtgtcctttgccggcacctctctgatgcactggtatcaccagaagcccggccagcagcccagactgctgatctacagagccagcaacctggaagccggcgtgcccgatagattttccggcagcggcagcaagaccgacttcaccctgaccatcagccccgtggaagccgaagatgccgccacctactactgccagcagagcagagagtacccctacaccttcggcggaggcaccaagctggaaatcaagaggggcggaggcggaagtggaggcggaggatctggcggcggaggctctcaggtccaactggtgcagagcggagccgaggtcgtgaagcctggcgcttccgtgaagattagctgcaaagccagcggctacacctttaccggctactttatgaactgggtcaagcagagccctggccagagcctggaatggatcggcagaatccacccctacgacggcgacaccttctacaaccagaagttccagggcaaggccaccctgacagtggacaagagcagcaacaccgcccacatggaactgctgagcctgaccagcgaggacttcgccgtgtactactgcaccagatacgacggcagccgggctatggactattggggccagggcaccaccgtgaccgtgtctagtacgcgtacgcgtggctcagcatggtctcatcctcagtttgaaaaaggtggagggtccgggggcggcagtggtggtagtgcttggtcccatccacagtttgaaaagtcgcgttcctccggaggtggtggctcccaggtgcagctggtgcagtctgggggaggcgtggtccagcctgggaggtccctgagactctcctgtaagtcttctggatacaccttcactaggtatacgatgcactgggtccgccaggctccagggaaggggctggagtggattggatacataaatcctagccgtggttatactaattataatcagaaggtgaaggaccgattcaccatctccagagacaactccaagaacacggcctttctgcaaatggacagcctgagacccgaggacacgggtgtgtatttctgtgcgagatattatgatgatcattactgccttgactactggggccagggcaccccggtcaccgtctcctcagtcgaaggtggaagtggaggttctggtggaagtggaggttcaggtggagtggacgacatccagatgacccagtctccatcctccctgtctgcatctgtaggagacagagtcaccatcacttgcagagcaagttcaagcgtaagctacatgaattggtatcagcagacaccagggaaagcccctaagagatggatctatgacacatccaaagtggcttctggggtcccatcaaggttcagtggcagtggatctgggacagattacactttcaccatcagcagtctgcaacctgaagatattgcaacttactactgtcaacagtggagtagtaaccctctcacttttggccaggggaccaagctgcagatcaccgagcagaaactgatctcggaagaggatctgtccggcggcagccatcaccaccatcaccacctcgagtag

SEQ ID NO: 2526 - DNA, 1560 bp, Artificial Sequence
  Synthetic Polynucleotide
atggccttaccagtgaccgccttgctcctgccgctggccttgctgctccacgccgccaggccggacatccagatgacacagactacatcctccctgtctgcctctctgggagacagagtcaccatcagttgcagggcaagtcaggacattagtaaatatttaaattggtatcagcagaaaccagatggaactgttaaactcctgatctaccatacatcaagattacactcaggagtcccatcaaggttcagtggcagtgggtctggaacagattattctctcaccattagcaacctggagcaagaagatattgccacttacttttgccaacagggtaatacgcttccgtacacgttcggaggggggaccaagctggagatcacaggtggcggtggctcgggcggtggtgggtcgggtggcggcggatctgaggtgaaactgcaggagtcaggacctggcctggtggcgccctcacagagcctgtccgtcacatgcactgtctcaggggtctcattacccgactatggtgtaagctggattcgccagcctccacgaaagggtctggagtggctgggagtaatatggggtagtgaaaccacatactataattcagctctcaaatccagactgaccatcatcaaggacaactccaagagccaagttttcttaaaaatgaacagtctgcaaactgatgacacagccatttactactgtgccaaacattattactacggtggtagctatgctatggactactggggtcaaggaacctcagtcaccgtctcctcacgcgtaacgcgtggaggtggtggctcccaggttcagctggttcagtctggggccgaagtgaagaaacctggggcctctgtgaaggtgtcctgcaaggcttccggctacacctttaccagctactacatccactgggtccgacaggcccctggacaaggactggaatggatcggctgtatctaccccggcaacgtgaacaccaactacaacgagaagttcaaggaccgggccacactgaccgtggacacctctatcagcaccgcctacatggaactgagccggctgagatccgatgataccgccgtgtacttctgcaccagaagccactacggcctggactggaacttcgatgtgtggggccagggcaccaccgtgacagtttctagcggaggcggaggatctggtggcggaggaagtggcggaggcggctctgatattcagatgacacagagcccctccagcctgtctgcctctgtgggagacagagtgaccatcacctgtcacgccagccagaacatctacgtgtggctgaactggtatcagcagaagcccggcaaggcccctaagctgctgatctacaaggccagcaatctgcacaccggcgtgcccagcagattttctggctctggcagcggcaccgacttcaccctgacaatatctagcctccagccagaggacttcgccacctactattgtcagcagggccagacatacccctacaccttcggcggaggcaccaaggtggaaatcaagcatcaccaccatcaccac

SEQ ID NO: 2527 - DNA, 1560 bp, Artificial Sequence
  Synthetic Polynucleotide
atggccttaccagtgaccgccttgctcctgccgctggccttgctgctccacgccgccaggccggagatcgtgatgacccagagccctgccaccctgtctctgagccctggcgaaagagccaccctgagctgtagagccagccaggacatcagcaagtacctgaactggtatcagcagaagcccggccaggcccccagactgctgatctaccacaccagcagactgcacagcggcatccccgccagattttctggctctggcagcggcaccgactacaccctgacaatcagcagcctccagcccgaggacttcgccgtgtacttctgtcagcaaggcaacaccctgccctacaccttcggccagggcaccaagctggaaatcaagggcggaggcggaagtggaggcggaggatctggcggcggaggctctcaggtgcaactccaggaatctggccctggcctcgtgaagcccagcgagacactgagcctgacctgtaccgtgtccggcgtgtccctgcctgactatggcgtgtcctggatcagacagccccctggcaagggcctggaatggatcggagtgatttggggcagcgaaaccacctactacaacagctccctgaagtccagagtgaccatctccaaggacaactccaagaaccaggtgtccctgaagctgagcagcgtgacagccgccgacaccgccgtgtattactgcgccaagcactactactacggcggcagctacgctatggactactggggccagggaaccctcgtgaccgtgtctagtacgcgtacgcgtggaggtggtggctcccaggttcagctggttcagtctggggccgaagtgaagaaacctggggcctctgtgaaggtgtcctgcaaggcttccggctacacctttaccagctactacatccactgggtccgacaggcccctggacaaggactggaatggatcggctgtatctaccccggcaacgtgaacaccaactacaacgagaagttcaaggaccgggccacactgaccgtggacacctctatcagcaccgcctacatggaactgagccggctgagatccgatgataccgccgtgtacttctgcaccagaagccactacggcctggactggaacttcgatgtgtggggccagggcaccaccgtgacagtttctagcggaggcggaggatctggtggcggaggaagtggcggaggcggctctgatattcagatgacacagagcccctccagcctgtctgcctctgtgggagacagagtgaccatcacctgtcacgccagccagaacatctacgtgtggctgaactggtatcagcagaagcccggcaaggcccctaagctgctgatctacaaggccagcaatctgcacaccggcgtgcccagcagattttctggctctggcagcggcaccgacttcaccctgacaatatctagcctccagccagaggacttcgccacctactattgtcagcagggccagacatacccctacaccttcggcggaggcaccaaggtggaaatcaagcatcaccaccatcaccac

SEQ ID NO: 2528 - DNA, 1560 bp, Artificial Sequence
  Synthetic Polynucleotide
atggccttaccagtgaccgccttgctcctgccgctggccttgctgctccacgccgccaggccggagatcgtgatgacccagagccctgccaccctgtctctgagccctggcgaaagagccaccctgagctgtagagccagccaggacatcagcaagtacctgaactggtatcagcagaagcccggccaggcccccagactgctgatctaccacaccagcagactgcacagcggcatccccgccagattttctggctctggcagcggcaccgactacaccctgacaatcagcagcctccagcccgaggacttcgccgtgtacttctgtcagcaaggcaacaccctgccctacaccttcggccagggcaccaagctggaaatcaagggcggaggcggaagtggaggcggaggatctggcggcggaggctctcaggtgcaactccaggaatctggccctggcctcgtgaagcccagcgagacactgagcctgacctgtaccgtgtccggcgtgtccctgcctgactatggcgtgtcctggatcagacagccccctggcaagggcctggaatggatcggagtgatttggggcagcgaaaccacctactaccaaagctccctgaagtccagagtgaccatctccaaggacaactccaagaaccaggtgtccctgaagctgagcagcgtgacagccgccgacaccgccgtgtattactgcgccaagcactactactacggcggcagctacgctatggactactggggccagggaaccctcgtgaccgtgtctagtacgcgtacgcgtggaggtggtggctcccaggttcagctggttcagtctggggccgaagtgaagaaacctggggcctctgtgaaggtgtcctgcaaggcttccggctacacctttaccagctactacatccactgggtccgacaggcccctggacaaggactggaatggatcggctgtatctaccccggcaacgtgaacaccaactacaacgagaagttcaaggaccgggccacactgaccgtggacacctctatcagcaccgcctacatggaactgagccggctgagatccgatgataccgccgtgtacttctgcaccagaagccactacggcctggactggaacttcgatgtgtggggccagggcaccaccgtgacagtttctagcggaggcggaggatctggtggcggaggaagtggcggaggcggctctgatattcagatgacacagagcccctccagcctgtctgcctctgtgggagacagagtgaccatcacctgtcacgccagccagaacatctacgtgtggctgaactggtatcagcagaagcccggcaaggcccctaagctgctgatctacaaggccagcaatctgcacaccggcgtgcccagcagattttctggctctggcagcggcaccgacttcaccctgacaatatctagcctccagccagaggacttcgccacctactattgtcagcagggccagacatacccctacaccttcggcggaggcaccaaggtggaaatcaagcatcaccaccatcaccac

SEQ ID NO: 2529 - DNA, 1563 bp, Artificial Sequence
  Synthetic Polynucleotide
atggccttaccagtgaccgccttgctcctgccgctggccttgctgctccacgccgccaggccggacgagatcgtgctgacacagagccccgccaccctgtcactgtctccaggcgaaagagccaccctgagctgtagcgccagcagcagcgtgtcctacatgcactggtatcagcagaagcccggccaggcccccagactgctgatctacgataccagcaagctggcctccggcatccccgccagattttctggcagcggctccggcaccgacttcaccctgacaatcagcagcctggaacccgaggacgtggccgtgtactactgttttcaaggcagcgtgtaccccttcaccttcggccagggcaccaagctggaaatcaagagaggtggcggtggctcgggcggtggtgggtcgggtggcggcggatctcaggtgcagctccaggaatctggccctggcctcgtgaagcctagccagaccctgagcctgacctgtaccgtgtctggcggcagcatcagcacaagcggcatgggcgtgggctggatcagacagcaccctggcaagggcctggaatggatcggccacatttggtgggacgacgacaagcggtacaaccccgccctgaagtccagagtgaccatcagcgtggacaccagcaagaaccagttcagcctgaagctgagcagcgtgacagccgccgataccgccgtgtattattgcgcccggatggaactgtggtcctactacttcgactactggggccagggaaccctcgtgaccgtgtctagtacgcgtacgcgtggaggtggtggctcccaggttcagctggttcagtctggggccgaagtgaagaaacctggggcctctgtgaaggtgtcctgcaaggcttccggctacacctttaccagctactacatccactgggtccgacaggcccctggacaaggactggaatggatcggctgtatctaccccggcaacgtgaacaccaactacaacgagaagttcaaggaccgggccacactgaccgtggacacctctatcagcaccgcctacatggaactgagccggctgagatccgatgataccgccgtgtacttctgcaccagaagccactacggcctggactggaacttcgatgtgtggggccagggcaccaccgtgacagtttctagcggaggcggaggatctggtggcggaggaagtggcggaggcggctctgatattcagatgacacagagcccctccagcctgtctgcctctgtgggagacagagtgaccatcacctgtcacgccagccagaacatctacgtgtggctgaactggtatcagcagaagcccggcaaggcccctaagctgctgatctacaaggccagcaatctgcacaccggcgtgcccagcagattttctggctctggcagcggcaccgacttcaccctgacaatatctagcctccagccagaggacttcgccacctactattgtcagcagggccagacatacccctacaccttcggcggaggcaccaaggtggaaatcaagcatcaccaccatcaccac

SEQ ID NO: 2530 - DNA, 1584 bp, Artificial Sequence
  Synthetic Polynucleotide
atggccctgcctgtgacagctctgctgctgcctctggcactgctgctgcacgccgccagacctgacatccagctgacacagagccctgccagcctggccgtgtctctgggacagagagccaccatcagctgcaaggccagccagagcgtggactacgacggcgacagctacctgaactggtatcagcagatccccggccagccccccaagctgctgatctacgatgccagcaacctggtgtccggcatcccccctagattttccggcagcggctccggcaccgacttcaccctgaatatccaccccgtggaaaaggtggacgccgccacctaccactgccagcagagcaccgaagatccctggacctttggcggaggcaccaagctggaaatcaagggaggcggaggaagtggcggcggaggatctgggggaggcggaagccaggtacagctccaacagtcaggggccgagctggtacgcccagggtccagcgtcaaaatatcatgtaaggcatctggctacgccttcagctcttactggatgaattgggtgaaacaacggccaggccagggactggagtggattggtcaaatttggccaggagacggggacacaaattacaacggaaaattcaagggaaaggccacacttaccgccgatgaaagtagttcaaccgcttatatgcagctgtcctccctcgcttctgaggactctgctgtgtacttttgcgcacgccgagaaaccaccactgtgggaagatactactacgctatggattattggggacagggcacaaccgtgaccgttagcagtacgcgtacgcgtggaggtggtggctcccaggttcagctggttcagtctggggccgaagtgaagaaacctggggcctctgtgaaggtgtcctgcaaggcttccggctacacctttaccagctactacatccactgggtccgacaggcccctggacaaggactggaatggatcggctgtatctaccccggcaacgtgaacaccaactacaacgagaagttcaaggaccgggccacactgaccgtggacacctctatcagcaccgcctacatggaactgagccggctgagatccgatgataccgccgtgtacttctgcaccagaagccactacggcctggactggaacttcgatgtgtggggccagggcaccaccgtgacagtttctagcggaggcggaggatctggtggcggaggaagtggcggaggcggctctgatattcagatgacacagagcccctccagcctgtctgcctctgtgggagacagagtgaccatcacctgtcacgccagccagaacatctacgtgtggctgaactggtatcagcagaagcccggcaaggcccctaagctgctgatctacaaggccagcaatctgcacaccggcgtgcccagcagattttctggctctggcagcggcaccgacttcaccctgacaatatctagcctccagccagaggacttcgccacctactattgtcagcagggccagacatacccctacaccttcggcggaggcaccaaggtggaaatcaagcatcaccaccatcaccac

SEQ ID NO: 2531 - DNA, 1635 bp, Artificial Sequence
  Synthetic Polynucleotide
atggccttaccagtgaccgccttgctcctgccgctggccttgctgctccacgccgccaggccgatcaacatctacaacgccgagcctgccaatcctagcgagaagaacagccccgaattcgacatcgtgatgacacagagccccgccacactgtcactgtctccaggcgaaagagccacactgagctgtcggagcagcaagagcctccagaacgtgaacggcaacacctacctgtactggttccagcagaagcccggccagtctcctcagctcctgatctacagaatgagcaacctgaacagcggcgtgcccgacagattttctggcagcggaagcggcaccgagttcaccctgaccataagcagcctggaacctgaggacttcgccgtgtactactgtatgcagcacctggaataccccatcaccttcggagccggcaccaagctggaaatcaaaggcggaggcggaagtggaggcggaggatctggcggcggaggctctgaagtgcaactggttgaatctggcggcggactggttaagcctggcggatctctgaagctgagctgtgccgccagcggctacacctttaccagctacgtgatgcactgggtccgacaggcccctggcaaaggacttgagtggatcggctacatcaacccctacaacgatggcaccaagtacaacgagaagttccagggcagagtgaccatcagctccgacaagagcatcagcaccgcctacatggaactgagcagcctgagaagcgaggataccgccatgtactattgcgccagaggcacctactactacggcaccagagtgttcgactactggggccagggaaccctggtcacagtctcttctacgcgtacgcgtggaggtggtggctcccaggttcagctggttcagtctggggccgaagtgaagaaacctggggcctctgtgaaggtgtcctgcaaggcttccggctacacctttaccagctactacatccactgggtccgacaggcccctggacaaggactggaatggatcggctgtatctaccccggcaacgtgaacaccaactacaacgagaagttcaaggaccgggccacactgaccgtggacacctctatcagcaccgcctacatggaactgagccggctgagatccgatgataccgccgtgtacttctgcaccagaagccactacggcctggactggaacttcgatgtgtggggccagggcaccaccgtgacagtttctagcggaggcggaggatctggtggcggaggaagtggcggaggcggctctgatattcagatgacacagagcccctccagcctgtctgcctctgtgggagacagagtgaccatcacctgtcacgccagccagaacatctacgtgtggctgaactggtatcagcagaagcccggcaaggcccctaagctgctgatctacaaggccagcaatctgcacaccggcgtgcccagcagattttctggctctggcagcggcaccgacttcaccctgacaatatctagcctccagccagaggacttcgccacctactattgtcagcagggccagacatacccctacaccttcggcggaggcaccaaggtggaaatcaagcatcaccaccatcaccac

SEQ ID NO: 2532 - DNA, 1566 bp, Artificial Sequence
  Synthetic Polynucleotide
atggccttaccagtgaccgccttgctcctgccgctggccttgctgctccacgccgccaggccggacatccagatgacacagagccctagcagcctgtctgccagcgtgggagacagagtgaccatcacatgcaaggccagcgaccacatcaacaactggctggcctggtatcagcagaagcctggacaggcccctaagctgctgatctacggcgctaccacactggaaacaggcgtgcccagcagattttctggcagcggctctggcaccgactacaccctgacaatatccagcctccagcctgaggacttcgccacctactactgtcagcagagctggaacaccccttggacattcggccagggcaccaagctggaaatcaagagaggcggaggcggaagtggaggcggaggatctggcggcggaggctctcaagttcagcttcaacagcctggcgctgagctggtcaaacctggcgcttctgtgaagatgagctgcaaagccagcggctacgccttcagcagctactggatcaactggatgaagcagaaacccggccagggactcgaatggatcggccaaatctatcccggcgacggcgacaccaactacaacggcaagttcaagggcagagccacactgaccgccgatacctctagcagcacagcctacatgcagctgagcagcctgaccagcgaagatagcgccgtgtacttctgtgcccggtccatcacaacagtcgtgggctgcgctatggactattggggccagggaacaagcgtgaccgtgtctagtacgcgtacgcgtggaggtggtggctcccaggttcagctggttcagtctggggccgaagtgaagaaacctggggcctctgtgaaggtgtcctgcaaggcttccggctacacctttaccagctactacatccactgggtccgacaggcccctggacaaggactggaatggatcggctgtatctaccccggcaacgtgaacaccaactacaacgagaagttcaaggaccgggccacactgaccgtggacacctctatcagcaccgcctacatggaactgagccggctgagatccgatgataccgccgtgtacttctgcaccagaagccactacggcctggactggaacttcgatgtgtggggccagggcaccaccgtgacagtttctagcggaggcggaggatctggtggcggaggaagtggcggaggcggctctgatattcagatgacacagagcccctccagcctgtctgcctctgtgggagacagagtgaccatcacctgtcacgccagccagaacatctacgtgtggctgaactggtatcagcagaagcccggcaaggcccctaagctgctgatctacaaggccagcaatctgcacaccggcgtgcccagcagattttctggctctggcagcggcaccgacttcaccctgacaatatctagcctccagccagaggacttcgccacctactattgtcagcagggccagacatacccctacaccttcggcggaggcaccaaggtggaaatcaagcatcaccaccatcaccac

SEQ ID NO: 2533 - DNA, 1566 bp, Artificial Sequence
  Synthetic Polynucleotide
atggccttaccagtgaccgccttgctcctgccgctggccttgctgctccacgccgccaggccggacatccagatgacccagagccctagctcactgagcgccagcgtgggcgacagggtgaccattacctgctccgccagccaggacatcagcaactacctgaactggtaccagcagaagcccggcaaggcccccaagctgctgatctactacacctccaacctgcactccggcgtgcccagcaggttcagcggaagcggcagcggcaccgatttcaccctgaccatctccagcctgcagcccgaggacttcgccacctactactgccagcagtacaggaagctcccctggactttcggccagggcaccaaactggagatcaagcgtggcggaggcggaagtggaggcggaggatctggcggcggaggctctcaggtgcagctggtccagagcggcgccgaagtgaagaagcccggcagctccgtgaaagtgagctgcaaggccagcggcggcaccttcagcaactactggatgcactgggtgaggcaggcccccggacagggcctggagtggatgggcgccacctacaggggccacagcgacacctactacaaccagaagttcaagggccgggtgaccatcaccgccgacaagagcaccagcaccgcctacatggaactgagcagcctcaggagcgaggacaccgctgtgtattactgcgccaggggcgccatctacgacggctacgacgtgctggacaactggggccagggcacactggtgaccgtgtccagcacgcgtacgcgtggaggtggtggctcccaggttcagctggttcagtctggggccgaagtgaagaaacctggggcctctgtgaaggtgtcctgcaaggcttccggctacacctttaccagctactacatccactgggtccgacaggcccctggacaaggactggaatggatcggctgtatctaccccggcaacgtgaacaccaactacaacgagaagttcaaggaccgggccacactgaccgtggacacctctatcagcaccgcctacatggaactgagccggctgagatccgatgataccgccgtgtacttctgcaccagaagccactacggcctggactggaacttcgatgtgtggggccagggcaccaccgtgacagtttctagcggaggcggaggatctggtggcggaggaagtggcggaggcggctctgatattcagatgacacagagcccctccagcctgtctgcctctgtgggagacagagtgaccatcacctgtcacgccagccagaacatctacgtgtggctgaactggtatcagcagaagcccggcaaggcccctaagctgctgatctacaaggccagcaatctgcacaccggcgtgcccagcagattttctggctctggcagcggcaccgacttcaccctgacaatatctagcctccagccagaggacttcgccacctactattgtcagcagggccagacatacccctacaccttcggcggaggcaccaaggtggaaatcaagcatcaccaccatcaccac

SEQ ID NO: 2534 - DNA, 1566 bp, Artificial Sequence
  Synthetic Polynucleotide
atggccttaccagtgaccgccttgctcctgccgctggccttgctgctccacgccgccaggccggacatcgtgctgacacagagccctgccaccctgtctctgagccctggcgatagagccaccatcagctgtagagccagcgagagcgtgaccatcctgggcagccacctgatctactggtatcagcagaagcccggccagccccccagactgctgattcagctggcctccaatgtgcagaccggcgtgccagccagattttccggcagcggcagcagaaccgacttcaccctgaccatcagcagcgtggaacccgaggacttcgccgtgtactactgcctccagagccggaccatccccagaacattcggccagggcaccaagctggaaatcaagagaggcggaggcggaagtggaggcggaggatctggcggcggaggctctcaggtgcagctggtgcagtctggccccgaagtgaagaaacccggcgagtccgtgaagatcagctgcaaggccagcggctacaccttccggcactacagcatgaactgggtcaagcaggccccaggccagggcctgaagtggatgggcagaatcaacaccgagagcggcgtgcccatctacgccgacgacttcaagggccggttcagcttcaccgtggacaccagcgccagcaccgcctacctggaaatctccagcctgaccagcgaggataccgccgtgtatttctgctccaacgactacctgtacagcctggatttctggggccagggaaccaccctgacagtgtcctctacgcgtacgcgtggaggtggtggctcccaggttcagctggttcagtctggggccgaagtgaagaaacctggggcctctgtgaaggtgtcctgcaaggcttccggctacacctttaccagctactacatccactgggtccgacaggcccctggacaaggactggaatggatcggctgtatctaccccggcaacgtgaacaccaactacaacgagaagttcaaggaccgggccacactgaccgtggacacctctatcagcaccgcctacatggaactgagccggctgagatccgatgataccgccgtgtacttctgcaccagaagccactacggcctggactggaacttcgatgtgtggggccagggcaccaccgtgacagtttctagcggaggcggaggatctggtggcggaggaagtggcggaggcggctctgatattcagatgacacagagcccctccagcctgtctgcctctgtgggagacagagtgaccatcacctgtcacgccagccagaacatctacgtgtggctgaactggtatcagcagaagcccggcaaggcccctaagctgctgatctacaaggccagcaatctgcacaccggcgtgcccagcagattttctggctctggcagcggcaccgacttcaccctgacaatatctagcctccagccagaggacttcgccacctactattgtcagcagggccagacatacccctacaccttcggcggaggcaccaaggtggaaatcaagcatcaccaccatcaccac

SEQ ID NO: 2535 - DNA, 1563 bp, Artificial Sequence
  Synthetic Polynucleotide
atggccttaccagtgaccgccttgctcctgccgctggccttgctgctccacgccgccaggccggacatcgtgctgacacagagccctgcttctctggccgtgtctctgggagagagagccaccatcaactgtagagccagcgagagcgtgtccgtgattggagcccacctgatccactggtatcagcagaagcctggacagcctcctaagctgctgatctacctggcctccaacctggaaacaggcgtgccagccagattttctggcagcggctctggcaccgatttcaccctgacaatcagcagcctccaggccgaagatgccgccatctactactgcctccagagccggatcttccccagaacctttggacagggcaccaagctggaaatcaaaggcggaggcggaagtggaggcggaggatctggcggcggaggctctcaagttcagctggtgcagtctggctccgagctgaagaaacctggcgagtccgtgaagatcagctgcaaggccagcggctacaccttcaccgactacagcatcaactgggtcaagcaggcccctggacagggactgaaatggatgggctggatcaacaccgagacaagagagcccgcctacgcctacgacttcagaggcagattcgtgttctccctggacaccagcgccagcacagcctatctccagatcagctctctgaaggccgaggataccgccgtgtacttctgcgccctggactacagctacgctatggactattggggccagggcaccctggtcacagtctcttctacgcgtacgcgtggaggtggtggctcccaggttcagctggttcagtctggggccgaagtgaagaaacctggggcctctgtgaaggtgtcctgcaaggcttccggctacacctttaccagctactacatccactgggtccgacaggcccctggacaaggactggaatggatcggctgtatctaccccggcaacgtgaacaccaactacaacgagaagttcaaggaccgggccacactgaccgtggacacctctatcagcaccgcctacatggaactgagccggctgagatccgatgataccgccgtgtacttctgcaccagaagccactacggcctggactggaacttcgatgtgtggggccagggcaccaccgtgacagtttctagcggaggcggaggatctggtggcggaggaagtggcggaggcggctctgatattcagatgacacagagcccctccagcctgtctgcctctgtgggagacagagtgaccatcacctgtcacgccagccagaacatctacgtgtggctgaactggtatcagcagaagcccggcaaggcccctaagctgctgatctacaaggccagcaatctgcacaccggcgtgcccagcagattttctggctctggcagcggcaccgacttcaccctgacaatatctagcctccagccagaggacttcgccacctactattgtcagcagggccagacatacccctacaccttcggcggaggcaccaaggtggaaatcaagcatcaccaccatcaccac

SEQ ID NO: 2536 - DNA, 1566 bp, Artificial Sequence
  Synthetic Polynucleotide
atggccttaccagtgaccgccttgctcctgccgctggccttgctgctccacgccgccaggccggacatcgtgctgacacagtctcccgccacactgtcactgagccctggcgatagagccacactgagctgtagagccagcgagagcgtgacaatcctgggcagccacctgatctactggtatcagcagaagcccggacaggcccctagactgctgattcagctcgccagcaatgtgcagacaggcatccctgccagattttccggcagcggcagcagaaccgatttcaccctgaccataagcagcctggaacctgaggacttcgccgtgtactactgcctccagagccggacaatccccagaacctttggacagggcaccaagctggaaatcaagagaggcggaggcggaagtggaggcggaggatctggcggcggaggctctcaagttcaactggtgcagagcggctccgagctgaagaaacctggcgagtccgtgaagattagctgcaaggccagcggctacaccttcacacactacagcatgaactgggtccgacaggctccaggccaaggactggaatggatgggcagaatcaacaccgagacaggcgagcccctgtacgccgacgatttcaagggcagattcgtgttcagcctggacaccagcgccagcacagcctatctccagatcagctctctgaaggccgaggacaccgccgtgtattattgcagcaacgactacctgtactccctggactattggggccagggcacactggtcacagtgtctagtacgcgtacgcgtggaggtggtggctcccaggttcagctggttcagtctggggccgaagtgaagaaacctggggcctctgtgaaggtgtcctgcaaggcttccggctacacctttaccagctactacatccactgggtccgacaggcccctggacaaggactggaatggatcggctgtatctaccccggcaacgtgaacaccaactacaacgagaagttcaaggaccgggccacactgaccgtggacacctctatcagcaccgcctacatggaactgagccggctgagatccgatgataccgccgtgtacttctgcaccagaagccactacggcctggactggaacttcgatgtgtggggccagggcaccaccgtgacagtttctagcggaggcggaggatctggtggcggaggaagtggcggaggcggctctgatattcagatgacacagagcccctccagcctgtctgcctctgtgggagacagagtgaccatcacctgtcacgccagccagaacatctacgtgtggctgaactggtatcagcagaagcccggcaaggcccctaagctgctgatctacaaggccagcaatctgcacaccggcgtgcccagcagattttctggctctggcagcggcaccgacttcaccctgacaatatctagcctccagccagaggacttcgccacctactattgtcagcagggccagacatacccctacaccttcggcggaggcaccaaggtggaaatcaagcatcaccaccatcaccac

SEQ ID NO: 2537 - DNA, 1569 bp, Artificial Sequence
  Synthetic Polynucleotide
atggccttaccagtgaccgccttgctcctgccgctggccttgctgctccacgccgccaggccggacgagatcgtgctgacacagagccctgccaccctgtctctgagccctggcgaaagagccaccctgagctgtagagccagccagagcgtgtccagctacctggcctggtatcagcagaagcccggccaggctccccggctgctgatctacgatgccagcaatagagccaccggcatccccgccagattttccggctctggcagcggcaccgacttcaccctgaccatcagctccctggaacccgaggacttcgccgtgtactactgccagcagcggagcaactggcccatcacattcggccagggcacccggctggaaatcaaaggcggaggcggaagtggaggcggaggatctggcggcggaggctctgaagtgcagctggtggaatcaggcggcggactggtgcagcctggcagaagcctgagactgagctgtgccgccagcggcttcaccttcaacgactacgccatgcactgggtgcgccaggcccctggaaaaggactggaatgggtgtccacaatcagctggaacagcggcagcatcggctacgccgatagcgtgaagggccggttcaccatcagccgggacaacgccaagaagtccctgtacctccagatgaacagcctgcgggccgaggacacagccctgtactattgcgccaaggacatccagtacggcaactactactacggcatggacgtgtggggccagggaaccaccgtgaccgtgtcatctacgcgtacgcgtggaggtggtggctcccaggttcagctggttcagtctggggccgaagtgaagaaacctggggcctctgtgaaggtgtcctgcaaggcttccggctacacctttaccagctactacatccactgggtccgacaggcccctggacaaggactggaatggatcggctgtatctaccccggcaacgtgaacaccaactacaacgagaagttcaaggaccgggccacactgaccgtggacacctctatcagcaccgcctacatggaactgagccggctgagatccgatgataccgccgtgtacttctgcaccagaagccactacggcctggactggaacttcgatgtgtggggccagggcaccaccgtgacagtttctagcggaggcggaggatctggtggcggaggaagtggcggaggcggctctgatattcagatgacacagagcccctccagcctgtctgcctctgtgggagacagagtgaccatcacctgtcacgccagccagaacatctacgtgtggctgaactggtatcagcagaagcccggcaaggcccctaagctgctgatctacaaggccagcaatctgcacaccggcgtgcccagcagattttctggctctggcagcggcaccgacttcaccctgacaatatctagcctccagccagaggacttcgccacctactattgtcagcagggccagacatacccctacaccttcggcggaggcaccaaggtggaaatcaagcatcaccaccatcaccac

SEQ ID NO: 2538 - DNA, 1575 bp, Artificial Sequence
  Synthetic Polynucleotide
atggccttaccagtgaccgccttgctcctgccgctggccttgctgctccacgccgccaggccggacatcgtgatgacccagacccccctgagcctgcctgtgacacctggcgagcctgccagcatctcctgcagaagcagcaagagcctgctgcacagcaacggcatcacctacctgtactggtatctgcagaaacccggccagagcccccaactgctgatctaccagatgagcaacctggtgtccggcgtgcccgacagattttctggcagcggctccggcaccgacttcaccctgaagatcagccgggtggaagccgaggacgtgggcgtgtactactgcgcccagaacctggaactgccctacacctttggcggcggaacaaaggtggaaatcaagcggggcggaggcggaagtggaggcggaggatctggcggcggaggctctcaggtgcaactggtgcagagcggagccgaagtgaaaaagcccggcagcagcgtgaaggtgtcctgcaaggccagcggctacgccttcagctactcctggatcaactgggtgcgccaggcccctggacagggcctggaatggatgggcagaatcttccccggcgacggcgacaccgactacaacggcaagttcaagggcagagtgaccatcaccgccgacaagagcaccagcaccgcctacatggaactgagcagcctgcggagcgaggataccgccgtgtactattgtgccagaaacgtgttcgacggctactggctggtgtactggggccagggaacacttgtgaccgtgtccagcacgcgtacgcgtggaggtggtggctcccaggttcagctggttcagtctggggccgaagtgaagaaacctggggcctctgtgaaggtgtcctgcaaggcttccggctacacctttaccagctactacatccactgggtccgacaggcccctggacaaggactggaatggatcggctgtatctaccccggcaacgtgaacaccaactacaacgagaagttcaaggaccgggccacactgaccgtggacacctctatcagcaccgcctacatggaactgagccggctgagatccgatgataccgccgtgtacttctgcaccagaagccactacggcctggactggaacttcgatgtgtggggccagggcaccaccgtgacagtttctagcggaggcggaggatctggtggcggaggaagtggcggaggcggctctgatattcagatgacacagagcccctccagcctgtctgcctctgtgggagacagagtgaccatcacctgtcacgccagccagaacatctacgtgtggctgaactggtatcagcagaagcccggcaaggcccctaagctgctgatctacaaggccagcaatctgcacaccggcgtgcccagcagattttctggctctggcagcggcaccgacttcaccctgacaatatctagcctccagccagaggacttcgccacctactattgtcagcagggccagacatacccctacaccttcggcggaggcaccaaggtggaaatcaagcatcaccaccatcaccac

SEQ ID NO: 2539 - DNA, 1566 bp, Artificial Sequence
  Synthetic Polynucleotide
atggccttaccagtgaccgccttgctcctgccgctggccttgctgctccacgccgccaggccggacatccagatgacacagagccctagcagcctgtctgccagcgtgggagacagagtgaccatcacctgtagagccagcagcagcgtgtcctacatgcactggtatcagcagaagcccggcaaggcccctaagcctctgatctacgcccctagcaatctggcctctggcgtgccaagcagattttctggcagcggctctggcaccgacttcaccctgacaatatccagcctccagcctgaggacttcgccacctactactgccagcagtggtccttcaatcctcctaccttcggccagggcaccaaggtggaaatcaaaagaggcggaggcggaagtggaggcggaggatctggcggcggaggctctgaagtgcagcttgttgaatctggcggcggactggttcagcctggcggatctctgagactgtcttgtgccgccagcggctacaccttcaccagctacaatatgcactgggtccgacaggcccctggcaaaggacttgaatgggtcggagccatctatcccggcaacggcgacacctcctacaaccagaagttcaagggcagattcaccatcagcgtggacaagagcaagaacaccctgtacctccagatgaactccctgagagccgaggacaccgccgtgtactattgtgccagagtggtgtactacagcaacagctactggtacttcgacgtgtggggccagggaaccctggtcacagtttcttctacgcgtacgcgtggaggtggtggctcccaggttcagctggttcagtctggggccgaagtgaagaaacctggggcctctgtgaaggtgtcctgcaaggcttccggctacacctttaccagctactacatccactgggtccgacaggcccctggacaaggactggaatggatcggctgtatctaccccggcaacgtgaacaccaactacaacgagaagttcaaggaccgggccacactgaccgtggacacctctatcagcaccgcctacatggaactgagccggctgagatccgatgataccgccgtgtacttctgcaccagaagccactacggcctggactggaacttcgatgtgtggggccagggcaccaccgtgacagtttctagcggaggcggaggatctggtggcggaggaagtggcggaggcggctctgatattcagatgacacagagcccctccagcctgtctgcctctgtgggagacagagtgaccatcacctgtcacgccagccagaacatctacgtgtggctgaactggtatcagcagaagcccggcaaggcccctaagctgctgatctacaaggccagcaatctgcacaccggcgtgcccagcagattttctggctctggcagcggcaccgacttcaccctgacaatatctagcctccagccagaggacttcgccacctactattgtcagcagggccagacatacccctacaccttcggcggaggcaccaaggtggaaatcaagcatcaccaccatcaccac

SEQ ID NO: 2540 - DNA, 1572 bp, Artificial Sequence
  Synthetic Polynucleotide
atggccttaccagtgaccgccttgctcctgccgctggccttgctgctccacgccgccaggccgcagatcgtgctgtctcagtctcctgccatcctgagcgcttccccaggcgagaaagtgaccatgacctgtagagccagcagcagcgtgtcctacatgcactggtatcagcagaagcccggcagcagccctaagccttggatctacgccaccagcaatctggcctctggcgtgccagccagattttctggctctggcagcggcaccagctacagcttcacaatcagcagagtggaagccgaggacgccgccacctactattgtcagcagtggaccttcaatcctcctaccttcggcggaggcacccggctggaaatcaaaagaacagtggctgctggcggaggcggaagtggaggcggaggatctggcggcggaggctctcaggcttatctgcaacagagcggagccgaactcgtcagacctggcgcttctgtgaagatgagctgcaaggccagcggctacaccttcaccagctataatatgcactgggtcaagcagacccctcggcagggactcgaatggatcggcggaatctatcccggcaacggcgacacctcctacaaccagaagttcaagggcaaagccacactgaccgtgggcaagagcagcagcaccgcctatatgcagctcagcagcctgaccagcgaggacagcgccgtgtacttctgcgccagatacgactacaactacgctatggactactggggccagggcaccagcgtgacagttagctctgccagcacgcgtacgcgtggaggtggtggctcccaggttcagctggttcagtctggggccgaagtgaagaaacctggggcctctgtgaaggtgtcctgcaaggcttccggctacacctttaccagctactacatccactgggtccgacaggcccctggacaaggactggaatggatcggctgtatctaccccggcaacgtgaacaccaactacaacgagaagttcaaggaccgggccacactgaccgtggacacctctatcagcaccgcctacatggaactgagccggctgagatccgatgataccgccgtgtacttctgcaccagaagccactacggcctggactggaacttcgatgtgtggggccagggcaccaccgtgacagtttctagcggaggcggaggatctggtggcggaggaagtggcggaggcggctctgatattcagatgacacagagcccctccagcctgtctgcctctgtgggagacagagtgaccatcacctgtcacgccagccagaacatctacgtgtggctgaactggtatcagcagaagcccggcaaggcccctaagctgctgatctacaaggccagcaatctgcacaccggcgtgcccagcagattttctggctctggcagcggcaccgacttcaccctgacaatatctagcctccagccagaggacttcgccacctactattgtcagcagggccagacatacccctacaccttcggcggaggcaccaaggtggaaatcaagcatcaccaccatcaccac

SEQ ID NO: 2541 - DNA, 1566 bp, Artificial Sequence; identical to SEQ ID NO: 2539
  Synthetic Polynucleotide

SEQ ID NO: 2542 - DNA, 1569 bp, Artificial Sequence
  Synthetic Polynucleotide
atggccttaccagtgaccgccttgctcctgccgctggccttgctgctccacgccgccaggccggacgagatcgtgctgacacagagccctgccaccctgtctctgagccctggcgaaagagccaccctgagctgtagagccagccagagcgtgtccagctacctggcctggtatcagcagaagcccggccaggctccccggctgctgatctacgatgccagcaatagagccaccggcatccccgccagattttccggctctggcagcggcaccgacttcaccctgaccatcagctccctggaacccgaggacttcgccgtgtactactgccagcagcggagcaactggcccatcacattcggccagggcacccggctggaaatcaaaggcggaggcggaagtggaggcggaggatctggcggcggaggctctgaggtgcagcttgttgagtctggcggaggactggtgcagcccgatagaagcctgagactgtcttgtgccgccagcggcttcaccttccacgattatgccatgcactgggtccgacaggcccctggcaaaggacttgaatgggtgtccaccatctcttggaacagcggcacaatcggctacgccgactctgtgaagggcagattcaccatcagccgggacaacgccaagaacagcctgtacctccagatgaactccctgagagccgaggacacagccctgtactactgcgccaaggacatccagtacggcaactactactacggcatggacgtgtggggccagggcacaacagtgacagtctcttctacgcgtacgcgtggaggtggtggctcccaggttcagctggttcagtctggggccgaagtgaagaaacctggggcctctgtgaaggtgtcctgcaaggcttccggctacacctttaccagctactacatccactgggtccgacaggcccctggacaaggactggaatggatcggctgtatctaccccggcaacgtgaacaccaactacaacgagaagttcaaggaccgggccacactgaccgtggacacctctatcagcaccgcctacatggaactgagccggctgagatccgatgataccgccgtgtacttctgcaccagaagccactacggcctggactggaacttcgatgtgtggggccagggcaccaccgtgacagtttctagcggaggcggaggatctggtggcggaggaagtggcggaggcggctctgatattcagatgacacagagcccctccagcctgtctgcctctgtgggagacagagtgaccatcacctgtcacgccagccagaacatctacgtgtggctgaactggtatcagcagaagcccggcaaggcccctaagctgctgatctacaaggccagcaatctgcacaccggcgtgcccagcagattttctggctctggcagcggcaccgacttcaccctgacaatatctagcctccagccagaggacttcgccacctactattgtcagcagggccagacatacccctacaccttcggcggaggcaccaaggtggaaatcaagcatcaccaccatcaccac

SEQ ID NO: 2543 - DNA, 1578 bp, Artificial Sequence
  Synthetic Polynucleotide
atggccttaccagtgaccgccttgctcctgccgctggccttgctgctccacgccgccaggccggacatccagatgacccagagccccagcagcctgtctgccagcgtgggcgacagagtgaccatcacctgtcggagcagccagagcatcgtgcactccgtgggcaacaccttcctggaatggtatcagcagaagcccggcaaggcccccaagctgctgatctacaaggtgtccaacagattcagcggcgtgcccagcaggtttagcggctctggcagcggcaccgacttcaccctgaccatctctagcctccagcccgaggacttcgccacctactactgttttcaaggcagccagttcccctacaccttcggccagggaacaaaggtggaaatcaagcggggcggaggcggaagtggaggcggaggatctggcggcggaggctctgaagtgcaactggtggaaagcggaggcggcctggtgcagcctggcggatctctgagactgagctgtgccgccagcggctacgagttcagccggtcctggatgaactgggtgcgccaggcccctggcaagggactggaatgggtgggaagaatctaccccggcgacggcgacaccaactacagcggcaagttcaagggccggttcaccatcagcgccgacaccagcaagaacaccgcctacctccagatgaacagcctgcgggccgaggataccgccgtgtactactgtgccagagatggcagctcctgggactggtacttcgacgtgtggggacagggaacccttgtgaccgtgtccagcacgcgtacgcgtggaggtggtggctcccaggttcagctggttcagtctggggccgaagtgaagaaacctggggcctctgtgaaggtgtcctgcaaggcttccggctacacctttaccagctactacatccactgggtccgacaggcccctggacaaggactggaatggatcggctgtatctaccccggcaacgtgaacaccaactacaacgagaagttcaaggaccgggccacactgaccgtggacacctctatcagcaccgcctacatggaactgagccggctgagatccgatgataccgccgtgtacttctgcaccagaagccactacggcctggactggaacttcgatgtgtggggccagggcaccaccgtgacagtttctagcggaggcggaggatctggtggcggaggaagtggcggaggcggctctgatattcagatgacacagagcccctccagcctgtctgcctctgtgggagacagagtgaccatcacctgtcacgccagccagaacatctacgtgtggctgaactggtatcagcagaagcccggcaaggcccctaagctgctgatctacaaggccagcaatctgcacaccggcgtgcccagcagattttctggctctggcagcggcaccgacttcaccctgacaatatctagcctccagccagaggacttcgccacctactattgtcagcagggccagacatacccctacaccttcggcggaggcaccaaggtggaaatcaagcatcaccaccatcaccac

SEQ ID NO: 2544 - DNA, 1554 bp, Artificial Sequence
  Synthetic Polynucleotide
atggccttaccagtgaccgccttgctcctgccgctggccttgctgctccacgccgccaggccggacatcgtgatgacccagagccccagcagcctgtctgccagcgtgggcgacagagtgaccatcacatgcaaggccagccagagcgtgaccaacgacgtggcctggtatcagcagaagcccggcaaggcccccaagctgctgatctactacgccagcaacagatacaccggcgtgcccagcagattcagcggctctggcagcggcaccgacttcaccctgaccatctctagcctccagcccgaggacttcgccacctactactgtcagcaggactacagaagcccctggaccttcggcggaggcaccaaggtggaaatcaagcggggcggaggcggaagtggaggcggaggatctggcggcggaggctctcaggtgcaactggaagaaagcgggggaggcgtcgtgcggcctggaagaagtctgagactgagctgtgccgccagcggcttcaccttcagcgactacggcgtgaactggatcagacaggcccctggcaagggcctggaatgggtcacaatcatctggggcgacggcagaaccgactacaacagcgccctgaagtcccggttcaccgtgtcccggaacaacagcaacaacaccctgagcctccagatgaacagcctgaccaccgaggacaccgccgtgtactactgtgtgcgggctcccggcaaccgggctatggaatattggggacagggcgtactcgtgaccgtgtcctctacgcgtacgcgtggaggtggtggctcccaggttcagctggttcagtctggggccgaagtgaagaaacctggggcctctgtgaaggtgtcctgcaaggcttccggctacacctttaccagctactacatccactgggtccgacaggcccctggacaaggactggaatggatcggctgtatctaccccggcaacgtgaacaccaactacaacgagaagttcaaggaccgggccacactgaccgtggacacctctatcagcaccgcctacatggaactgagccggctgagatccgatgataccgccgtgtacttctgcaccagaagccactacggcctggactggaacttcgatgtgtggggccagggcaccaccgtgacagtttctagcggaggcggaggatctggtggcggaggaagtggcggaggcggctctgatattcagatgacacagagcccctccagcctgtctgcctctgtgggagacagagtgaccatcacctgtcacgccagccagaacatctacgtgtggctgaactggtatcagcagaagcccggcaaggcccctaagctgctgatctacaaggccagcaatctgcacaccggcgtgcccagcagattttctggctctggcagcggcaccgacttcaccctgacaatatctagcctccagccagaggacttcgccacctactattgtcagcagggccagacatacccctacaccttcggcggaggcaccaaggtggaaatcaagcatcaccaccatcaccac

SEQ ID NO: 2545 - DNA, 1572 bp, Artificial Sequence
  Synthetic Polynucleotide
atggccttaccagtgaccgccttgctcctgccgctggccttgctgctccacgccgccaggccgcaggtgcagctccagcagtctggacccggcctcgtgaagcctagccagacactgagcctgacctgcgccatcagcggcgatagcgtgtccagcaatagcgccgcctggaactggatcagacagtccccctctcggggcctggaatggctgggccggacctactaccgcagcaagtggtacaacgactacgccgtgtccgtgaagtcccggatcaccatcaaccccgacaccagcaagaaccagttctccttgcaactgaacagcgtgacccccgaggacaccgccgtgtactactgcgccagagaagtgaccggcgacctggaagatgccttcgacatctggggccagggaacaatggtcacagtgtccagcggcggaggcggaagtggaggcggaggatctggcggcggaggctctgacatccagatgacccagagccccagcagcctgtctgccagcgtgggcgacagagtgaccatcacctgtagagccagccagaccatctggtcctacctgaactggtatcagcagaggcccggcaaggcccccaacctgctgatctatgccgccagctctctccagagcggcgtgcccagcagattttccggcagaggcagcggcaccgacttcaccctgaccatcagttccttgcaggccgaggacttcgccacctactactgccagcagagctacagcatcccccagattttcggccagggcaccaagctggaaatcaagacgcgtacgcgtggaggtggtggctcccaggttcagctggttcagtctggggccgaagtgaagaaacctggggcctctgtgaaggtgtcctgcaaggcttccggctacacctttaccagctactacatccactgggtccgacaggcccctggacaaggactggaatggatcggctgtatctaccccggcaacgtgaacaccaactacaacgagaagttcaaggaccgggccacactgaccgtggacacctctatcagcaccgcctacatggaactgagccggctgagatccgatgataccgccgtgtacttctgcaccagaagccactacggcctggactggaacttcgatgtgtggggccagggcaccaccgtgacagtttctagcggaggcggaggatctggtggcggaggaagtggcggaggcggctctgatattcagatgacacagagcccctccagcctgtctgcctctgtgggagacagagtgaccatcacctgtcacgccagccagaacatctacgtgtggctgaactggtatcagcagaagcccggcaaggcccctaagctgctgatctacaaggccagcaatctgcacaccggcgtgcccagcagattttctggctctggcagcggcaccgacttcaccctgacaatatctagcctccagccagaggacttcgccacctactattgtcagcagggccagacatacccctacaccttcggcggaggcaccaaggtggaaatcaagcatcaccaccatcaccac

SEQ ID NO: 2546 - DNA, 1569 bp, Artificial Sequence
  Synthetic Polynucleotide
atggccttaccagtgaccgccttgctcctgccgctggccttgctgctccacgccgccaggccggaggtgcaactggttgagtctggcggaggactggtgcagcctggaagaagcctgagactgtcttgtgccgccagcggcttcaccttcgacgattatgccatgcactgggtccgacaggcccctggcaaaggacttgaatgggtgtccggcatctcctggaacagcggctctatcggctacgccgattccgtgaagggcagattcaccatcagccgggacaacgccaagaacagcctgtacctccagatgaactccctgagagccgaggacacagccctgtactactgcgccaaagacaaaggcggaggctactacgacttttggagcggcagcgattattggggccagggcacactggtcacagtgtctagcggcggaggcggaagtggaggcggaggatctggcggcggaggctcttcttctgagctgacacaggaccctgccgtgtctgttgctctgggccagacagtgcggattacctgtcagggcgatagcctgagaagctactacgcctcctggtatcagcagaagccaggccaggctcctgtgctggtcatctacggcaagaacaacagacccagcggcatccccgatagattcagcggaagcagctctggcaataccgccagcctgacaattactggcgctcaggccgaggacgaggccgactactactgcaacagcagagatagcagcggctgggttttcggcggaggcacaaaactgacagtgctgacgcgtacgcgtggaggtggtggctcccaggttcagctggttcagtctggggccgaagtgaagaaacctggggcctctgtgaaggtgtcctgcaaggcttccggctacacctttaccagctactacatccactgggtccgacaggcccctggacaaggactggaatggatcggctgtatctaccccggcaacgtgaacaccaactacaacgagaagttcaaggaccgggccacactgaccgtggacacctctatcagcaccgcctacatggaactgagccggctgagatccgatgataccgccgtgtacttctgcaccagaagccactacggcctggactggaacttcgatgtgtggggccagggcaccaccgtgacagtttctagcggaggcggaggatctggtggcggaggaagtggcggaggcggctctgatattcagatgacacagagcccctccagcctgtctgcctctgtgggagacagagtgaccatcacctgtcacgccagccagaacatctacgtgtggctgaactggtatcagcagaagcccggcaaggcccctaagctgctgatctacaaggccagcaatctgcacaccggcgtgcccagcagattttctggctctggcagcggcaccgacttcaccctgacaatatctagcctccagccagaggacttcgccacctactattgtcagcagggccagacatacccctacaccttcggcggaggcaccaaggtggaaatcaagcatcaccaccatcaccac

SEQ ID NO: 2547 - DNA, 1596 bp, Artificial Sequence
  Synthetic Polynucleotide
atggccttaccagtgaccgccttgctcctgccgctggccttgctgctccacgccgccaggccggaagtgcagctccagcagtctggacctggcctggttaagcctagccagacactgagcctgacctgtgccatcagcggcgatagcgtgctgagcaacagcgacacctggaactggatcagacagagccctagcagaggactggaatggctgggcagaacctaccacagaagcacttggtacgacgactacgccagctctgtgcggggcagagtgtccatcaatgtggacaccagcaagaaccagtacagcctgcaactgaacgccgtgacacctgaggataccggcgtgtactactgcgccagagacagactccaggacggcaactcttggagcgacgcctttgatgtgtggggccagggcacaatggtcaccgtttctagcggcggaggcggaagtggaggcggaggatctggcggcggaggctctcaatctgctctgacacagcctgccagcgtgtcaggatctcctggacagagcatcaccatctcttgcaccggcaccagctctgatgtcggcggctacaattacgtgtcctggtatcagcagcaccccggcaaggcccctaagctgatgatctacgacgtgtccaacagacccagcggcgtgtccaatagattctccggcagcaagagcggcaacaccgccagcctgacaatttctggactgcaagccgaggacgaggccgactactactgtagcagctacaccagcagcagcacactggtgtacgtgttcggcacaggcaccaaagtgaccgtgcttacgcgtacgcgtggaggtggtggctcccaggttcagctggttcagtctggggccgaagtgaagaaacctggggcctctgtgaaggtgtcctgcaaggcttccggctacacctttaccagctactacatccactgggtccgacaggcccctggacaaggactggaatggatcggctgtatctaccccggcaacgtgaacaccaactacaacgagaagttcaaggaccgggccacactgaccgtggacacctctatcagcaccgcctacatggaactgagccggctgagatccgatgataccgccgtgtacttctgcaccagaagccactacggcctggactggaacttcgatgtgtggggccagggcaccaccgtgacagtttctagcggaggcggaggatctggtggcggaggaagtggcggaggcggctctgatattcagatgacacagagcccctccagcctgtctgcctctgtgggagacagagtgaccatcacctgtcacgccagccagaacatctacgtgtggctgaactggtatcagcagaagcccggcaaggcccctaagctgctgatctacaaggccagcaatctgcacaccggcgtgcccagcagattttctggctctggcagcggcaccgacttcaccctgacaatatctagcctccagccagaggacttcgccacctactattgtcagcagggccagacatacccctacaccttcggcggaggcaccaaggtggaaatcaagcatcaccaccatcaccac

SEQ ID NO: 2548 - DNA, 1572 bp, Artificial Sequence
  Synthetic Polynucleotide
atggccttaccagtgaccgccttgctcctgccgctggccttgctgctccacgccgccaggccggacgacatccagatgacccagaccacaagcagcctgtctgccagcctgggcgacagagtgaccatctcttgtagagccagccaggacatcagcaactacctgaactggtatcagcagaaacccgacggcaccgtgaagctgctgatctactacaccagcatcctgcacagcggcgtgcccagcagattttctggctctggcagcggcaccgactacagcctgaccatcagcaatctggaacaagaggacttcgctacctacttctgccagcaaggcaacaccctgccttggacatttggcggaggcaccaagctggaaatcaaagctggcggaggcggaagtggaggcggaggatctggcggcggaggctctgaagtgcaactggttgaatctggcggcggactggttaagcctggcggatctctgaagctgagctgtgccgcctctggcttcgccttcagcatctacgatatgagctgggtccgacagacccctgagaagagactggaatgggtcgcctacatctctagcggcggagggacctactatcccgacacagtgaagggcagattcaccatctccagagacaacgccaagaacaccctgtacctccagatgagcagcctgaagtccgaggacaccgccatgtactactgcgccagacacagcggctatggcacacattggggagtgctgtttgcctactggggccagggaacactggtcacagtttctgctacgcgtacgcgtggaggtggtggctcccaggttcagctggttcagtctggggccgaagtgaagaaacctggggcctctgtgaaggtgtcctgcaaggcttccggctacacctttaccagctactacatccactgggtccgacaggcccctggacaaggactggaatggatcggctgtatctaccccggcaacgtgaacaccaactacaacgagaagttcaaggaccgggccacactgaccgtggacacctctatcagcaccgcctacatggaactgagccggctgagatccgatgataccgccgtgtacttctgcaccagaagccactacggcctggactggaacttcgatgtgtggggccagggcaccaccgtgacagtttctagcggaggcggaggatctggtggcggaggaagtggcggaggcggctctgatattcagatgacacagagcccctccagcctgtctgcctctgtgggagacagagtgaccatcacctgtcacgccagccagaacatctacgtgtggctgaactggtatcagcagaagcccggcaaggcccctaagctgctgatctacaaggccagcaatctgcacaccggcgtgcccagcagattttctggctctggcagcggcaccgacttcaccctgacaatatctagcctccagccagaggacttcgccacctactattgtcagcagggccagacatacccctacaccttcggcggaggcaccaaggtggaaatcaagcatcaccaccatcaccac

SEQ ID NO: 2549 - DNA, 1551 bp, Artificial Sequence
  Synthetic Polynucleotide
atggccttaccagtgaccgccttgctcctgccgctggccttgctgctccacgccgccaggccggacatccagatgacccagagccccgccaccatcgagaacacaagcctgtctgccagcgtgggcgacagagtgaccatcacctgtagagccagccagggcatcagctcttggctgacctggtatcagcagaagcccgagaaggcccccaagagcctgatctacgccgccagctctctgcagtctggcgtgcccagcagattttccggcagcggctctggcaccgacttcaccctgacaatcagcagcctgcagcccgaggacttcgccacctactactgccagcagtacgacagctaccccatcaccttcggccagggcacccggctggaaatcaagggcggaggcggaagtggaggcggaggatctggcggcggaggctctcaggtgcaactgcagcagtggggagccggactgctgaagcctagcgagacactgagcctgacctgcgccgtgtacggcggcagcttcagcgcctactattggagctggatcagacagccccctggcaagggcctggaatggatcggcgacatcaatcacggcggaggcaccaactacaaccccagcctgaagtcccgcgtgaccatctccgtggacaccagcaagaaccagttctccctgaagctgaacagcgtgacagccgccgacacagccgtgtactactgtgccagcctgaccgcctattggggccagggatctcttgtgaccgtgtccagcacgcgtacgcgtggaggtggtggctcccaggttcagctggttcagtctggggccgaagtgaagaaacctggggcctctgtgaaggtgtcctgcaaggcttccggctacacctttaccagctactacatccactgggtccgacaggcccctggacaaggactggaatggatcggctgtatctaccccggcaacgtgaacaccaactacaacgagaagttcaaggaccgggccacactgaccgtggacacctctatcagcaccgcctacatggaactgagccggctgagatccgatgataccgccgtgtacttctgcaccagaagccactacggcctggactggaacttcgatgtgtggggccagggcaccaccgtgacagtttctagcggaggcggaggatctggtggcggaggaagtggcggaggcggctctgatattcagatgacacagagcccctccagcctgtctgcctctgtgggagacagagtgaccatcacctgtcacgccagccagaacatctacgtgtggctgaactggtatcagcagaagcccggcaaggcccctaagctgctgatctacaaggccagcaatctgcacaccggcgtgcccagcagattttctggctctggcagcggcaccgacttcaccctgacaatatctagcctccagccagaggacttcgccacctactattgtcagcagggccagacatacccctacaccttcggcggaggcaccaaggtggaaatcaagcatcaccaccatcaccac

SEQ ID NO: 2550 - DNA, 1566 bp, Artificial Sequence
  Synthetic Polynucleotide
atggccttaccagtgaccgccttgctcctgccgctggccttgctgctccacgccgccaggccggacgagatcgtgctgacccagagccctgatagcctggccgtgtctctgggcgagagagccaccatcaactgcaaggccagccagagcgtggacttcgacggcgacagctacctgaactggtatcagcagaagcccggccagccccccaaggtgctgatctatgccgccagcacactgcagagcggcgtgcccagcagattttctggcagcggctccggcaccgacttcaccctgaccatcaacagcctggaagccgaggacgccgccacctactactgccagcagagcaacgaggacccctggacctttggcggcggaacaaaggtggaaatcaagggcggaggcggaagtggaggcggaggatctggcggcggaggctctcaggtgcaactggtgcagtccggcgctgaagtgaagaaacctggggccagcgtgaaggtgtcctgcaaggtgtccggctacacctttaccgactactacattacctgggtgcgccaggcccctggacaggccctggaatggatgggctggatctaccccggcagcggcaacaccaagtacagccagaagttccagggcagattcgtgttcagcgtggacaccagcgccagcaccgcctacctgcaactgtctagcctgaaggccgaagataccgccgtgtactactgcgccaactacggcaactattggttcgcctattggggccagggaacccttgtgaccgtgtcctctacgcgtacgcgtggaggtggtggctcccaggttcagctggttcagtctggggccgaagtgaagaaacctggggcctctgtgaaggtgtcctgcaaggcttccggctacacctttaccagctactacatccactgggtccgacaggcccctggacaaggactggaatggatcggctgtatctaccccggcaacgtgaacaccaactacaacgagaagttcaaggaccgggccacactgaccgtggacacctctatcagcaccgcctacatggaactgagccggctgagatccgatgataccgccgtgtacttctgcaccagaagccactacggcctggactggaacttcgatgtgtggggccagggcaccaccgtgacagtttctagcggaggcggaggatctggtggcggaggaagtggcggaggcggctctgatattcagatgacacagagcccctccagcctgtctgcctctgtgggagacagagtgaccatcacctgtcacgccagccagaacatctacgtgtggctgaactggtatcagcagaagcccggcaaggcccctaagctgctgatctacaaggccagcaatctgcacaccggcgtgcccagcagattttctggctctggcagcggcaccgacttcaccctgacaatatctagcctccagccagaggacttcgccacctactattgtcagcagggccagacatacccctacaccttcggcggaggcaccaaggtggaaatcaagcatcaccaccatcaccac

SEQ ID NO: 2551 - DNA, 1557 bp, Artificial Sequence
  Synthetic Polynucleotide
atggccttaccagtgaccgccttgctcctgccgctggccttgctgctccacgccgccaggccggacatccagatgacccagagccccagcagcctgtctgccagcgtgggcgacagagtgaccatcacctgtagagccagccagggcatcagctcttggctggcctggtatcagcagaagcccgagaaggcccccaagagcctgatctacgccgcctctagtctccagagcggcgtgcccagcagattttctggcagcggctccggcaccgacttcaccctgacaatcagctccctccagcccgaggacttcgccacctactactgccagcagtacaacagctaccctcccacctttggcggaggcaccaaggtggaaatcaagggcggaggcggaagtggaggcggaggatctggcggcggaggctctgaagtgcaactggtgcagtctggcggagggctggtgcatcctgggggaagcctgagactgagctgtgccggctctggcttcgccttcagcagcagcaccatgcactggatcagacaggcccctggcaagggcctggaatggatcagcctgatcggaagcggagggggcatctactacggcgacagcgtgaagggccggttcaccatcagccgggacaacgccaagaacagcctgtacctccagatgaactccctgcgggccgaggacatggccgtgtactattgtgtgcggggctacttcgactgggtggactacttcgattactggggccagggcaccctcgtgaccgtgtcatctacgcgtacgcgtggaggtggtggctcccaggttcagctggttcagtctggggccgaagtgaagaaacctggggcctctgtgaaggtgtcctgcaaggcttccggctacacctttaccagctactacatccactgggtccgacaggcccctggacaaggactggaatggatcggctgtatctaccccggcaacgtgaacaccaactacaacgagaagttcaaggaccgggccacactgaccgtggacacctctatcagcaccgcctacatggaactgagccggctgagatccgatgataccgccgtgtacttctgcaccagaagccactacggcctggactggaacttcgatgtgtggggccagggcaccaccgtgacagtttctagcggaggcggaggatctggtggcggaggaagtggcggaggcggctctgatattcagatgacacagagcccctccagcctgtctgcctctgtgggagacagagtgaccatcacctgtcacgccagccagaacatctacgtgtggctgaactggtatcagcagaagcccggcaaggcccctaagctgctgatctacaaggccagcaatctgcacaccggcgtgcccagcagattttctggctctggcagcggcaccgacttcaccctgacaatatctagcctccagccagaggacttcgccacctactattgtcagcagggccagacatacccctacaccttcggcggaggcaccaaggtggaaatcaagcatcaccaccatcaccac

SEQ ID NO: 2552 - DNA, 1587 bp, Artificial Sequence
  Synthetic Polynucleotide
atggccttaccagtgaccgccttgctcctgccgctggccttgctgctccacgccgccaggccggacgacatcgtgatgacacagtcaccagatagcctcaccgtctccctgggggagcggaccaccattaattgtaaatccagccaaagcgtgctggactcaagcaagaacaagaatagcctcgcctggtatcagcagaagcccggtcagcctccaaagctgctgctttcttgggcctccaccagagagtccgggattcctgataggtttagtggttcaggctccggcacagattttactctgaccattgattctctccagccagaggattctgcaacttattactgccagcaaagcgcccactttcctataacttttggccagggaacccgacttgaaatcaagggcggaggcggaagtggaggcggaggatctggcggcggaggctctcaggtgcagctggtgcagagcggtgccgaagtgaagaaaccaggtgcatccgttaaagtttcatgtaaggctagtggatataccttcaccaattacggaatgaactgggtgaaacaggcccctggccagggactgaagtggatggggtggattaacacctacaccggggagccgacttatgcagacgactttaaggggcgggtcacgatgacctccgacacctccaccagtaccgcctacctggagctgcacaaccttaggtcagacgataccgccgtgtattactgtgcccgatggtcttggtccgacggatactatgtctacttcgactattggggccaggggaccacagttaccgtgtcctctacgcgtacgcgtggaggtggtggctcccaggttcagctggttcagtctggggccgaagtgaagaaacctggggcctctgtgaaggtgtcctgcaaggcttccggctacacctttaccagctactacatccactgggtccgacaggcccctggacaaggactggaatggatcggctgtatctaccccggcaacgtgaacaccaactacaacgagaagttcaaggaccgggccacactgaccgtggacacctctatcagcaccgcctacatggaactgagccggctgagatccgatgataccgccgtgtacttctgcaccagaagccactacggcctggactggaacttcgatgtgtggggccagggcaccaccgtgacagtttctagcggaggcggaggatctggtggcggaggaagtggcggaggcggctctgatattcagatgacacagagcccctccagcctgtctgcctctgtgggagacagagtgaccatcacctgtcacgccagccagaacatctacgtgtggctgaactggtatcagcagaagcccggcaaggcccctaagctgctgatctacaaggccagcaatctgcacaccggcgtgcccagcagattttctggctctggcagcggcaccgacttcaccctgacaatatctagcctccagccagaggacttcgccacctactattgtcagcagggccagacatacccctacaccttcggcggaggcaccaaggtggaaatcaagcatcaccaccatcaccac

SEQ ID NO: 2553 - DNA, 1575 bp, Artificial Sequence
  Synthetic Polynucleotide
atggccttaccagtgaccgccttgctcctgccgctggccttgctgctccacgccgccaggccggacgagatcgtgctgacacagagccctggaagcctggccgtgtctcctggcgagcgcgtgacaatgagctgcaagagcagccagagcgtgttcttcagcagctcccagaagaactacctggcctggtatcagcagatccccggccagagccccagactgctgatctactgggccagcaccagagaaagcggcgtgcccgatagattcaccggcagcggctctggcaccgacttcaccctgacaatcagcagcgtgcagcccgaggacctggctatctactactgccaccagtacctgagcagccggaccttcggccagggcaccaagctggaaatcaagagaggcggaggcggaagtggaggcggaggatctggcggcggaggctctcaggtgcaactgcagcagcctggcgctgaggtcgtgaagccaggcgcttccgtgaagatgtcctgcaaggccagcggctacaccttcaccagctactacatccactggatcaagcagacccctggacagggcctggaatgggtgggagtgatctaccccggcaacgacgacatcagctacaaccagaagttccagggcaaggccaccctgaccgccgacaagtctagcaccaccgcctacatgcaactgtccagcctgaccagcgaggacagcgccgtgtactactgcgccagagaagtgcggctgcggtacttcgatgtgtggggccagggaaccaccgtgaccgtgtcatctacgcgtacgcgtggaggtggtggctcccaggttcagctggttcagtctggggccgaagtgaagaaacctggggcctctgtgaaggtgtcctgcaaggcttccggctacacctttaccagctactacatccactgggtccgacaggcccctggacaaggactggaatggatcggctgtatctaccccggcaacgtgaacaccaactacaacgagaagttcaaggaccgggccacactgaccgtggacacctctatcagcaccgcctacatggaactgagccggctgagatccgatgataccgccgtgtacttctgcaccagaagccactacggcctggactggaacttcgatgtgtggggccagggcaccaccgtgacagtttctagcggaggcggaggatctggtggcggaggaagtggcggaggcggctctgatattcagatgacacagagcccctccagcctgtctgcctctgtgggagacagagtgaccatcacctgtcacgccagccagaacatctacgtgtggctgaactggtatcagcagaagcccggcaaggcccctaagctgctgatctacaaggccagcaatctgcacaccggcgtgcccagcagattttctggctctggcagcggcaccgacttcaccctgacaatatctagcctccagccagaggacttcgccacctactattgtcagcagggccagacatacccctacaccttcggcggaggcaccaaggtggaaatcaagcatcaccaccatcaccac

SEQ ID NO: 2554 - DNA, 1650 bp, Artificial Sequence
  Synthetic Polynucleotide
atggccttaccagtgaccgccttgctcctgccgctggccttgctgctccacgccgccaggccgtacatcaacatctacaacgccgagcctgccaatcctagcgagaagaacagccccacacagtacgcctacggcagcggagaattcgacatcgtgatgacacagagccctagcagcctgtctgcctctctcggcggcaaagtgaccatcacatgcaaggccagccaggacatcaacaagtatatcgcctggtatcagcacaagcccggcaagggacctagactgctgatccactacaccagcacactccagcctggcatccccagcagattttctggcagcggctccggcagagactacagcttcagcatcagcaacctggaacctgaggacattgccacctactactgcctccagtacgacaacctgctgacctttggagccggcaccaagctggaactgaaaagaggcggaggcggaagtggaggcggaggatctggcggcggaggctctgaagtgaaactccagcagagcggccctgagctggttaagcctggcaccagcgtgaaggtgtcctgtaaagccagcggctactccttcaccgactacaacatgtactgggtcaagcagagccacggcaagagcctggaatggatcggctacatcgacccctacaaaggcggcaccatctacaaccagaagttcaagggcaaagccacactgaccgtggacaagagcagcagcaccgccttcatgcacctgaacagcctgaccagcgaggacagcgccgtgtactattgcgccagagagatgattaccgcctactacttcgactactggggccagggaagcagcgtgaccgttagctctctggaaagaacgcgtacgcgtggaggtggtggctcccaggttcagctggttcagtctggggccgaagtgaagaaacctggggcctctgtgaaggtgtcctgcaaggcttccggctacacctttaccagctactacatccactgggtccgacaggcccctggacaaggactggaatggatcggctgtatctaccccggcaacgtgaacaccaactacaacgagaagttcaaggaccgggccacactgaccgtggacacctctatcagcaccgcctacatggaactgagccggctgagatccgatgataccgccgtgtacttctgcaccagaagccactacggcctggactggaacttcgatgtgtggggccagggcaccaccgtgacagtttctagcggaggcggaggatctggtggcggaggaagtggcggaggcggctctgatattcagatgacacagagcccctccagcctgtctgcctctgtgggagacagagtgaccatcacctgtcacgccagccagaacatctacgtgtggctgaactggtatcagcagaagcccggcaaggcccctaagctgctgatctacaaggccagcaatctgcacaccggcgtgcccagcagattttctggctctggcagcggcaccgacttcaccctgacaatatctagcctccagccagaggacttcgccacctactattgtcagcagggccagacatacccctacaccttcggcggaggcaccaaggtggaaatcaagcatcaccaccatcaccac

SEQ ID NO: 2555 - DNA, 1698 bp, Artificial Sequence
  Synthetic Polynucleotide
atggccttaccagtgaccgccttgctcctgccgctggccttgctgctccacgccgccaggccggacatccagatgacacagagccctagcagcctgtctgccagcgtgggagatagagtgaccatcaactgcaaggccagccaggacatcaacagctacctgagctggttccagcagaagcctggcaaggcccctaagacactgatctaccgggccaacagactggtggatggcgtgccaagcagattttctggcagcggcagcggccaggattacaccctgacaatatccagcctccagcctgaggacttcgccacctactactgcctccagtacgacgagttccctctgacctttggcggaggcaccaaggtggaaatcaaaggcggaggcggaagtggaggcggaggatctggcggcggaggctctcaggtgcaactggtgcagtctggggccgaagtgaagaaacctggggcctctgtgaaggtgtcctgcaaagccagcggctacacctttaccaactacgacatcaactgggtccgacaggctccaggccaaggactggaatggatcggctggatctatcctggcgacggcagcaccaagtacaacgagaagttcaaggccaaggccacactgaccgccgataccagcacaagcaccgcctacatggaactgcggagcctgagaagcgacgacaccgccgtgtactattgtgcctccggctacgaggacgctatggactattggggccagggcaccaccgtgacagtgtctagtgccaagcctaccaccacaccagctccaagacctccaactcctgctcctacaatcgccagccagcctctgtctctcagacccgaagcctgtagacctgctgctggcggagctgtgcataccagaggactggatttcgcctgcgacatcacgcgtacgcgtggaggtggtggctcccaggttcagctggttcagtctggggccgaagtgaagaaacctggggcctctgtgaaggtgtcctgcaaggcttccggctacacctttaccagctactacatccactgggtccgacaggcccctggacaaggactggaatggatcggctgtatctaccccggcaacgtgaacaccaactacaacgagaagttcaaggaccgggccacactgaccgtggacacctctatcagcaccgcctacatggaactgagccggctgagatccgatgataccgccgtgtacttctgcaccagaagccactacggcctggactggaacttcgatgtgtggggccagggcaccaccgtgacagtttctagcggaggcggaggatctggtggcggaggaagtggcggaggcggctctgatattcagatgacacagagcccctccagcctgtctgcctctgtgggagacagagtgaccatcacctgtcacgccagccagaacatctacgtgtggctgaactggtatcagcagaagcccggcaaggcccctaagctgctgatctacaaggccagcaatctgcacaccggcgtgcccagcagattttctggctctggcagcggcaccgacttcaccctgacaatatctagcctccagccagaggacttcgccacctactattgtcagcagggccagacatacccctacaccttcggcggaggcaccaaggtggaaatcaagcatcaccaccatcaccac

SEQ ID NO: 2556 - DNA, 1566 bp, Artificial Sequence
  Synthetic Polynucleotide
atggccttaccagtgaccgccttgctcctgccgctggccttgctgctccacgccgccaggccggagatcgtgctgacacagagccctctgagcctgcctgttacacctggcgagcctgccagcatctcctgtagaagctctcagagcctgctgcacagcaacggctacaactacctggactggtatctccagaagcctggacagagcccacagctcctgatctacctgggcgtgaactctgtgtccggcgtgcccgatagattttctggcagcggctctggcaccgacttcaccctgaagatcagcagagtggaagccgaggacgtgggcgtgtactactgtatgcaggccctccagacaccttggacattcggccagggcaccaaggtggaaatcaaaggcggcggaggatctggcggaggtggaagtggcggaggcggatctcaagtgcaactggttcagagcggagccgaagtgaagaaacctggcagcagcgtgaaggtgtcctgcaaagcctctggcggcatcttcagcaaccacgccatctcttgggtccgacaggctcctggacaaggactggaatggatgggcggcatcatccccatcttcggcacagccaattacgcccagaaattccagggcagagtgaccatcaccgccgacgagtctaccagcaccgccttcatggaactgagcagcctgagaagcgaggacaccgccgtgtactattgcgccagagaatgggccgacgtgttcgacatttggggccagggaacaatggtcaccgtgtcctctacgcgtacgcgtggaggtggtggctcccaggttcagctggttcagtctggggccgaagtgaagaaacctggggcctctgtgaaggtgtcctgcaaggcttccggctacacctttaccagctactacatccactgggtccgacaggcccctggacaaggactggaatggatcggctgtatctaccccggcaacgtgaacaccaactacaacgagaagttcaaggaccgggccacactgaccgtggacacctctatcagcaccgcctacatggaactgagccggctgagatccgatgataccgccgtgtacttctgcaccagaagccactacggcctggactggaacttcgatgtgtggggccagggcaccaccgtgacagtttctagcggaggcggaggatctggtggcggaggaagtggcggaggcggctctgatattcagatgacacagagcccctccagcctgtctgcctctgtgggagacagagtgaccatcacctgtcacgccagccagaacatctacgtgtggctgaactggtatcagcagaagcccggcaaggcccctaagctgctgatctacaaggccagcaatctgcacaccggcgtgcccagcagattttctggctctggcagcggcaccgacttcaccctgacaatatctagcctccagccagaggacttcgccacctactattgtcagcagggccagacatacccctacaccttcggcggaggcaccaaggtggaaatcaagcatcaccaccatcaccac

SEQ ID NO: 2557 - DNA, 1563 bp, Artificial Sequence
  Synthetic Polynucleotide
atggccttaccagtgaccgccttgctcctgccgctggccttgctgctccacgccgccaggccggacatccagatgacacagtctccagccagcctgaccgtgtcactgggacagagagccaccatctcttgcagagccagcgagagcgtggacagctacggcaatagctacctgcactggtatcagcagaagcccggccagcctcctcagctcctgatctacctggcctccaatctggaaagcggcgtgccagccagattttctggcagcggcagcagaaccgacttcaccctgaccattgatcccgtggaagccgatgatgccgccacctactactgccagcagaacaacgaggacccctggacatttggcggaggcaccaaggtggaaatcaaaggcggcggaggatctggcggaggtggaagtggcggaggcggatctgaagttcagctccagcagagcggagccgagcttgtgaaacctggcgcttccgtgaagatgagctgcaaagccttcggctacaccttcaccacctttccaatcgagtggatgaagcagagccacggcaagagcctggaatggatcggcaactttcacccctacaacgaccagaccaagtacaacgaagagttcaagggcagagccaagctgaccatcgacagatccagcagcaccgtgtacctggaactgggcagactgacctccgatgacagcgccgtgtactactgtgccagaggctactactacgccttcgacttttggggccagggcaccacactgacagtgtctagcacgcgtacgcgtggaggtggtggctcccaggttcagctggttcagtctggggccgaagtgaagaaacctggggcctctgtgaaggtgtcctgcaaggcttccggctacacctttaccagctactacatccactgggtccgacaggcccctggacaaggactggaatggatcggctgtatctaccccggcaacgtgaacaccaactacaacgagaagttcaaggaccgggccacactgaccgtggacacctctatcagcaccgcctacatggaactgagccggctgagatccgatgataccgccgtgtacttctgcaccagaagccactacggcctggactggaacttcgatgtgtggggccagggcaccaccgtgacagtttctagcggaggcggaggatctggtggcggaggaagtggcggaggcggctctgatattcagatgacacagagcccctccagcctgtctgcctctgtgggagacagagtgaccatcacctgtcacgccagccagaacatctacgtgtggctgaactggtatcagcagaagcccggcaaggcccctaagctgctgatctacaaggccagcaatctgcacaccggcgtgcccagcagattttctggctctggcagcggcaccgacttcaccctgacaatatctagcctccagccagaggacttcgccacctactattgtcagcagggccagacatacccctacaccttcggcggaggcaccaaggtggaaatcaagcatcaccaccatcaccac

SEQ ID NO: 2558 - DNA, 1581 bp, Artificial Sequence
  Synthetic Polynucleotide
atggccttaccagtgaccgccttgctcctgccgctggccttgctgctccacgccgccaggccggacatcgtgatgacccagagccccgatagcctggccgtgtctctgggagagagagccaccatcaactgcgagagcagccagagcctgctgaacagcggcaaccagaagaactacctgacctggtatcagcagaagcccggccagccccccaagcccctgatctattgggccagcaccagagaaagcggcgtgcccgatagattcagcggcagcggaagcggcaccgacttcaccctgaccatcagttctcttcaggccgaggacgtggccgtgtactactgccagaacgactacagctacccctacaccttcggccagggcaccaagctggaaatcaagagaggcggaggcggaagtggaggcggaggatctggcggcggaggctctgaagtgcagctggtgcagtctggggccgaagtgaagaagcctggcgagagcctgaagatcagctgcaagggcagcggctacagcttcaccgactactacatgaagtgggccagacagatgcccggcaagggcctggaatggatgggcgacatcatccccagcaacggggccaccttctacaaccagaaattcaagggccaagtgaccatctccgccgacaagagcatcagcaccacctacctccagtggtccagcctgaaggccagcgacaccgccatgtactattgcgccagaagccatctgctgcgggccagttggttcgcctattggggccagggaacaatggtcacagtgtccagcacgcgtacgcgtggaggtggtggctcccaggttcagctggttcagtctggggccgaagtgaagaaacctggggcctctgtgaaggtgtcctgcaaggcttccggctacacctttaccagctactacatccactgggtccgacaggcccctggacaaggactggaatggatcggctgtatctaccccggcaacgtgaacaccaactacaacgagaagttcaaggaccgggccacactgaccgtggacacctctatcagcaccgcctacatggaactgagccggctgagatccgatgataccgccgtgtacttctgcaccagaagccactacggcctggactggaacttcgatgtgtggggccagggcaccaccgtgacagtttctagcggaggcggaggatctggtggcggaggaagtggcggaggcggctctgatattcagatgacacagagcccctccagcctgtctgcctctgtgggagacagagtgaccatcacctgtcacgccagccagaacatctacgtgtggctgaactggtatcagcagaagcccggcaaggcccctaagctgctgatctacaaggccagcaatctgcacaccggcgtgcccagcagattttctggctctggcagcggcaccgacttcaccctgacaatatctagcctccagccagaggacttcgccacctactattgtcagcagggccagacatacccctacaccttcggcggaggcaccaaggtggaaatcaagcatcaccaccatcaccac

SEQ ID NO: 2559 - DNA, 1566 bp, Artificial Sequence
  Synthetic Polynucleotide
atggccttaccagtgaccgccttgctcctgccgctggccttgctgctccacgccgccaggccggacatcgtgctgacacagagccctgcttctctggccgtgtctctgggacagagagccaccatcagctgtagagccagcgagagcgtggacaactacggcaacaccttcatgcactggtatcagcagaagcccggccagcctcctaagctgctgatctacagagccagcaacctggaaagcggcatccccgccagattttctggcagcggcagcagaaccgacttcaccctgaccatcaatcccgtggaagccgacgacgtggcaacctactactgccagcagagcaacgaggaccctcctacatttggagccggcaccaagctggaactgaaaggcggaggcggaagtggaggcggaggatctggcggcggaggctctcagattcagctggtgcagtctggccccgagctgaagaaacctggcgagacagtgaagatcagctgcaaggccagcggctacatcttcaccaattacggcatgaactgggtcaagcaggcccctggcaagagcttcaagtggatgggctggatcaacacctacaccggcgagagcacatacagcgccgacttcaagggcagattcgccttcagcctggaaaccagcgccagcacagcctacctgcacatcaacgacctgaagaacgaggacaccgccacctacttttgcgccagaagcggcggctacgaccctatggattattggggccagggcaccagcgtgaccgtttcttctacgcgtacgcgtggaggtggtggctcccaggttcagctggttcagtctggggccgaagtgaagaaacctggggcctctgtgaaggtgtcctgcaaggcttccggctacacctttaccagctactacatccactgggtccgacaggcccctggacaaggactggaatggatcggctgtatctaccccggcaacgtgaacaccaactacaacgagaagttcaaggaccgggccacactgaccgtggacacctctatcagcaccgcctacatggaactgagccggctgagatccgatgataccgccgtgtacttctgcaccagaagccactacggcctggactggaacttcgatgtgtggggccagggcaccaccgtgacagtttctagcggaggcggaggatctggtggcggaggaagtggcggaggcggctctgatattcagatgacacagagcccctccagcctgtctgcctctgtgggagacagagtgaccatcacctgtcacgccagccagaacatctacgtgtggctgaactggtatcagcagaagcccggcaaggcccctaagctgctgatctacaaggccagcaatctgcacaccggcgtgcccagcagattttctggctctggcagcggcaccgacttcaccctgacaatatctagcctccagccagaggacttcgccacctactattgtcagcagggccagacatacccctacaccttcggcggaggcaccaaggtggaaatcaagcatcaccaccatcaccac

SEQ ID NO: 2560 - DNA, 1578 bp, Artificial Sequence
  Synthetic Polynucleotide
atggccttaccagtgaccgccttgctcctgccgctggccttgctgctccacgccgccaggccggacttcgtgatgacacagagccctgatagcctggccgtgtctctcggcgagcgagtgaccatgagctgcaagtctagccagagcctgctgaacagcggcaaccagaagaactacctgacctggtatcagcagaagcccggccagcctcctaagctgctgatctactgggccagcaccagagaaagcggcgtgcccgatagattttctggctctggcagcggcaccgacttcaccctgacaatttctagcctgcaagccgaggacgtggccgtgtactactgccagaacgactacagctacccctacaccttcggccagggcaccaagctggaaatcaaaggcggaggcggaagtggaggcggaggatctggcggcggaggctctgaagtgcaactggttcagagcggagccgagctgaagaaacctggggccagcgtgaaggtgtcctgtaaagccagcggctacacctttaccgactactacatgaaatgggtccgacaggccccaggccagggactcgaatggatcggcgatattatccccagcaacggggccaccttctacaaccagaaattcaagggccgcgtgaccatcaccgtggacaagagcacaagcaccgcctacatggaactgagcagcctgagaagcgaggacaccgccgtgtattattgcgccagaagccatctgctgcgggccagttggttcgcctattggggacagggaaccctggtcaccgttagctctacgcgtacgcgtggaggtggtggctcccaggttcagctggttcagtctggggccgaagtgaagaaacctggggcctctgtgaaggtgtcctgcaaggcttccggctacacctttaccagctactacatccactgggtccgacaggcccctggacaaggactggaatggatcggctgtatctaccccggcaacgtgaacaccaactacaacgagaagttcaaggaccgggccacactgaccgtggacacctctatcagcaccgcctacatggaactgagccggctgagatccgatgataccgccgtgtacttctgcaccagaagccactacggcctggactggaacttcgatgtgtggggccagggcaccaccgtgacagtttctagcggaggcggaggatctggtggcggaggaagtggcggaggcggctctgatattcagatgacacagagcccctccagcctgtctgcctctgtgggagacagagtgaccatcacctgtcacgccagccagaacatctacgtgtggctgaactggtatcagcagaagcccggcaaggcccctaagctgctgatctacaaggccagcaatctgcacaccggcgtgcccagcagattttctggctctggcagcggcaccgacttcaccctgacaatatctagcctccagccagaggacttcgccacctactattgtcagcagggccagacatacccctacaccttcggcggaggcaccaaggtggaaatcaagcatcaccaccatcaccac

SEQ ID NO: 2561 - DNA, 1578 bp, Artificial Sequence
  Synthetic Polynucleotide
atggccttaccagtgaccgccttgctcctgccgctggccttgctgctccacgccgccaggccggacttcgtgatgacacagagccctgatagcctggccgtgtctctcggcgagcgagtgaccatgagctgcaagtctagccagagcctgctgaacagcggcaaccagaagaactacctgacctggtatcagcagaagcccggccagcctcctaagctgctgatctactgggccagcaccagagaaagcggcgtgcccgatagattttctggctctggcagcggcaccgacttcaccctgacaatttctagcctgcaagccgaggacgtggccgtgtactactgccagaacgactacagctacccctacaccttcggccagggcaccaagctggaaatcaaaggcggaggcggaagtggaggcggaggatctggcggcggaggctctcaagtgcaactggttcagagcggagccgagctgaagaaacctggggccagcgtgaaggtgtcctgtaaagccagcggctacacctttaccgactactacatgaaatgggtccgacaggccccaggccagggactcgaatggatcggcgatattatccccagcaacggggccaccttctacaaccagaaattcaagggccgcgtgaccatcaccgtggacaagagcacaagcaccgcctacatggaactgagcagcctgagaagcgaggacaccgccgtgtattattgcgccagaagccatctgctgcgggccagttggttcgcctattggggacagggaaccctggtcaccgttagctctacgcgtacgcgtggaggtggtggctcccaggttcagctggttcagtctggggccgaagtgaagaaacctggggcctctgtgaaggtgtcctgcaaggcttccggctacacctttaccagctactacatccactgggtccgacaggcccctggacaaggactggaatggatcggctgtatctaccccggcaacgtgaacaccaactacaacgagaagttcaaggaccgggccacactgaccgtggacacctctatcagcaccgcctacatggaactgagccggctgagatccgatgataccgccgtgtacttctgcaccagaagccactacggcctggactggaacttcgatgtgtggggccagggcaccaccgtgacagtttctagcggaggcggaggatctggtggcggaggaagtggcggaggcggctctgatattcagatgacacagagcccctccagcctgtctgcctctgtgggagacagagtgaccatcacctgtcacgccagccagaacatctacgtgtggctgaactggtatcagcagaagcccggcaaggcccctaagctgctgatctacaaggccagcaatctgcacaccggcgtgcccagcagattttctggctctggcagcggcaccgacttcaccctgacaatatctagcctccagccagaggacttcgccacctactattgtcagcagggccagacatacccctacaccttcggcggaggcaccaaggtggaaatcaagcatcaccaccatcaccac

SEQ ID NO: 2562 - DNA, 1581 bp, Artificial Sequence
  Synthetic Polynucleotide
atggccttaccagtgaccgccttgctcctgccgctggccttgctgctccacgccgccaggccggacatcgtgatgacacagagcccttctagcctggccgtgtctgagggcgagacagtgaccatcaactgcaagagcagccagagcttcctgtctagcggcgacggcaagaattacgtggcctggtatcagtacaagcccggacagagccccaagctgctgatctactgggccagcacaagacagagcggcgtgcccgatagattcatcggctctggcagcggcaccgacttcaccctgacaatctctacagtgcaggccgaggacctggctatctactactgccagcagtattacgacacccctctgacctttggctccggcaccaagctggaaatcaaaggcggaggcggaagtggaggcggaggatctggcggcggaggctctgaagtgaagctgcaagagtctggccccagcctggtgcagagtagccaaacactgagcctgacctgtaccgtgtccggctttagcctgaccagctaccacatccactgggtccgacagacccctggcaaaggactggaatggatgggcgtgatgtggagcgacggcgacaccagctataacagcgccctgaagtcccggctgagcatcagcagagatacaagccagagccaggtgttcctgaagatgaacagcctccagaccgaggacaccgccacctactattgtgccagaggctactacagcagctacctgtacctttggttcgcctattggggccagggcaccctggttacagtcagctctacgcgtacgcgtggaggtggtggctcccaggttcagctggttcagtctggggccgaagtgaagaaacctggggcctctgtgaaggtgtcctgcaaggcttccggctacacctttaccagctactacatccactgggtccgacaggcccctggacaaggactggaatggatcggctgtatctaccccggcaacgtgaacaccaactacaacgagaagttcaaggaccgggccacactgaccgtggacacctctatcagcaccgcctacatggaactgagccggctgagatccgatgataccgccgtgtacttctgcaccagaagccactacggcctggactggaacttcgatgtgtggggccagggcaccaccgtgacagtttctagcggaggcggaggatctggtggcggaggaagtggcggaggcggctctgatattcagatgacacagagcccctccagcctgtctgcctctgtgggagacagagtgaccatcacctgtcacgccagccagaacatctacgtgtggctgaactggtatcagcagaagcccggcaaggcccctaagctgctgatctacaaggccagcaatctgcacaccggcgtgcccagcagattttctggctctggcagcggcaccgacttcaccctgacaatatctagcctccagccagaggacttcgccacctactattgtcagcagggccagacatacccctacaccttcggcggaggcaccaaggtggaaatcaagcatcaccaccatcaccac

SEQ ID NO: 2563 - DNA, 1593 bp, Artificial Sequence
  Synthetic Polynucleotide
atggccttaccagtgaccgccttgctcctgccgctggccttgctgctccacgccgccaggccggacgtgctgatgacccagacacctgtgtctctgccagtgtctctcggaggccaggtgtccatctcctgtagaagcagccagagcctggtgcactccgacggcgatacctacctgcactggtatctccagaagcctggacagagccctcagctcctgatctaccgggtgtccaacagattcagcggcgtgcccgatagattttccggcagcggctctggcaccgacttcaccctgaagatcagcagagtggaacccgaggacctgggcctgtactactgtctccagaccacacacttcccaccttggacctttggcggaggcaccaagctggaaatgaaaggcggaggcggaagtggaggcggaggatctggcggcggaggctctcaggttcagctccagcagtctggacccgagcttagaaggccaggatctagcgtcagactgagctgcaaggccagcggctaccggatcaaggacttcctgatccactggattaagaacagacccgagcacggcctggaatggatcggatggattgaccctgaggacggcgagactaagtacgcccagaagttccagaccaaggccacactgaccgccgacacctctagcaacaccgcctacatgcaactgagcagcctgaccagcgaggacaccgccacctacttttgtgctagatggggcgacgtgtactacggcctgatgagaggccatgtgatggatgcctggggccagggaacaagcgtgacagtctcttctacgcgtacgcgtggaggtggtggctcccaggttcagctggttcagtctggggccgaagtgaagaaacctggggcctctgtgaaggtgtcctgcaaggcttccggctacacctttaccagctactacatccactgggtccgacaggcccctggacaaggactggaatggatcggctgtatctaccccggcaacgtgaacaccaactacaacgagaagttcaaggaccgggccacactgaccgtggacacctctatcagcaccgcctacatggaactgagccggctgagatccgatgataccgccgtgtacttctgcaccagaagccactacggcctggactggaacttcgatgtgtggggccagggcaccaccgtgacagtttctagcggaggcggaggatctggtggcggaggaagtggcggaggcggctctgatattcagatgacacagagcccctccagcctgtctgcctctgtgggagacagagtgaccatcacctgtcacgccagccagaacatctacgtgtggctgaactggtatcagcagaagcccggcaaggcccctaagctgctgatctacaaggccagcaatctgcacaccggcgtgcccagcagattttctggctctggcagcggcaccgacttcaccctgacaatatctagcctccagccagaggacttcgccacctactattgtcagcagggccagacatacccctacaccttcggcggaggcaccaaggtggaaatcaagcatcaccaccatcaccac

SEQ ID NO: 2564 - DNA, 1566 bp, Artificial Sequence
  Synthetic Polynucleotide
atggccttaccagtgaccgccttgctcctgccgctggccttgctgctccacgccgccaggccggacatccagatgacccagtctaccagttccctgagtgcatccctcggagacagggtgacgatcagttgcagcgcaagccaagggatcaataactatctgaactggtatcagcagaaaccggacggaacagtcgaactcctgatttattacaccagcacccttcagagtggcgtcccttcccggttcagtggctccggaagcgggaccgattactccctgaccatttctaatctggagccagaggacataggaacgtattattgccagcagtatagtaaactgccacgaacttttggaggggggacgaaactggagatcaaaggcggaggcggaagtggaggcggaggatctggcggcggaggctctcaggtgcaactccagcagtccggaagcgagcttatgatgccaggggcatcagtgaagatcagctgcaaggctactggctacaccttctctaattactggatagagtgggttaaacaaaggccagggcacggcctggaatggatcggcgagatcctgcctgggacaggccgaaccatttataacgagaagttcaaaggcaaggctactttcaccgcagatataagctctaatacagtgcaaatgcagctctcttccctgacaagtgaggatagtgccgtgtattattgcgcacgaagagattactatggaaatttttattacgctatggattattggggtcaaggaacaagtgtgaccgttagcagcacgcgtacgcgtggaggtggtggctcccaggttcagctggttcagtctggggccgaagtgaagaaacctggggcctctgtgaaggtgtcctgcaaggcttccggctacacctttaccagctactacatccactgggtccgacaggcccctggacaaggactggaatggatcggctgtatctaccccggcaacgtgaacaccaactacaacgagaagttcaaggaccgggccacactgaccgtggacacctctatcagcaccgcctacatggaactgagccggctgagatccgatgataccgccgtgtacttctgcaccagaagccactacggcctggactggaacttcgatgtgtggggccagggcaccaccgtgacagtttctagcggaggcggaggatctggtggcggaggaagtggcggaggcggctctgatattcagatgacacagagcccctccagcctgtctgcctctgtgggagacagagtgaccatcacctgtcacgccagccagaacatctacgtgtggctgaactggtatcagcagaagcccggcaaggcccctaagctgctgatctacaaggccagcaatctgcacaccggcgtgcccagcagattttctggctctggcagcggcaccgacttcaccctgacaatatctagcctccagccagaggacttcgccacctactattgtcagcagggccagacatacccctacaccttcggcggaggcaccaaggtggaaatcaagcatcaccaccatcaccac

SEQ ID NO: 2565 - DNA, 1557 bp, Artificial Sequence
  Synthetic Polynucleotide
atggccttaccagtgaccgccttgctcctgccgctggccttgctgctccacgccgccaggccggacatccagatgacccagagccccagcagcctgtctgccagcgtgggcgacagagtgaccatcacatgcaaggccagccaggacgtgggaatcgccgtggcctggtatcagcagaaacccggcaaggtgcccaagctgctgatctactgggccagcaccagacacaccggcgtgcccgatagattttccggcagcggctccggcaccgacttcaccctgacaatcagctccctccagcccgaggacgtggcaacctactactgccagcagtacagcagctacccctacaccttcggccagggcaccaaggtggaaatcaagggcggaggcggaagtggaggcggaggatctggcggcggaggctctgaagtgcaactggtggaatcaggcggcggactggtgcagcctggcggatctctgagactgagctgtgccgccagcggcttcgacttcagccggtactggatgagctgggtgcgccaggcccctggcaaaggactggaatggatcggcgagatcaaccccgacagcagcaccatcaactacgcccccagcctgaaggacaagttcatcatcagccgggacaacgccaagaacagcctgtacctccagatgaactccctgcgggccgaggacaccgccgtgtactattgcgccagacccgacggcaactactggtacttcgacgtgtggggccagggaaccctcgtgaccgtgtcatctacgcgtacgcgtggaggtggtggctcccaggttcagctggttcagtctggggccgaagtgaagaaacctggggcctctgtgaaggtgtcctgcaaggcttccggctacacctttaccagctactacatccactgggtccgacaggcccctggacaaggactggaatggatcggctgtatctaccccggcaacgtgaacaccaactacaacgagaagttcaaggaccgggccacactgaccgtggacacctctatcagcaccgcctacatggaactgagccggctgagatccgatgataccgccgtgtacttctgcaccagaagccactacggcctggactggaacttcgatgtgtggggccagggcaccaccgtgacagtttctagcggaggcggaggatctggtggcggaggaagtggcggaggcggctctgatattcagatgacacagagcccctccagcctgtctgcctctgtgggagacagagtgaccatcacctgtcacgccagccagaacatctacgtgtggctgaactggtatcagcagaagcccggcaaggcccctaagctgctgatctacaaggccagcaatctgcacaccggcgtgcccagcagattttctggctctggcagcggcaccgacttcaccctgacaatatctagcctccagccagaggacttcgccacctactattgtcagcagggccagacatacccctacaccttcggcggaggcaccaaggtggaaatcaagcatcaccaccatcaccac

SEQ ID NO: 2566 - DNA, 1560 bp, Artificial Sequence
  Synthetic Polynucleotide
atggccttaccagtgaccgccttgctcctgccgctggccttgctgctccacgccgccaggccggacatcgtgatgacccagagccagaagagcatgagcaccagcgtgggcgacagagtgagcatcacctgcaaggccagccaggacgtgatcaccggcgtggcctggtaccagcagaagcccggccagagccccaagctgctgatctacagcgccagctacagatacaccggcgtgcccgacagattcaccggcagcggcagcggcaccgacttcaccttcaccatcagcaacgtgcaggccgaggacctggccgtgtactactgccagcagcactacagcacccccctgaccttcggcgccggcaccaagctggagctgaagggcggaggcggaagtggaggcggaggatctggcggcggaggctctcaggtgcagctgcagcagcccggcgccgagctggtgagacccggcgccagcgtgaagctgagctgcaaggccagcggctacagcttcaccacctactggatgaactgggtgaagcagagacccggccagggcctggagtggatcggcatgatccaccccagcgacagcgagaccagactgaaccagaagttcaaggacaaggccaccctgaccgtggacaagagcagcagcaccgcctacatgcagctgagcagccccaccagcgaggacagcgccgtgtactactgcgccagaagcaccatgatcgccaccagagccatggactactggggccagggcaccagcgtgaccgtgagcagcacgcgtacgcgtggaggtggtggctcccaggttcagctggttcagtctggggccgaagtgaagaaacctggggcctctgtgaaggtgtcctgcaaggcttccggctacacctttaccagctactacatccactgggtccgacaggcccctggacaaggactggaatggatcggctgtatctaccccggcaacgtgaacaccaactacaacgagaagttcaaggaccgggccacactgaccgtggacacctctatcagcaccgcctacatggaactgagccggctgagatccgatgataccgccgtgtacttctgcaccagaagccactacggcctggactggaacttcgatgtgtggggccagggcaccaccgtgacagtttctagcggaggcggaggatctggtggcggaggaagtggcggaggcggctctgatattcagatgacacagagcccctccagcctgtctgcctctgtgggagacagagtgaccatcacctgtcacgccagccagaacatctacgtgtggctgaactggtatcagcagaagcccggcaaggcccctaagctgctgatctacaaggccagcaatctgcacaccggcgtgcccagcagattttctggctctggcagcggcaccgacttcaccctgacaatatctagcctccagccagaggacttcgccacctactattgtcagcagggccagacatacccctacaccttcggcggaggcaccaaggtggaaatcaagcatcaccaccatcaccac

SEQ ID NO: 2567 - DNA, 1575 bp, Artificial Sequence
  Synthetic Polynucleotide
atggccttaccagtgaccgccttgctcctgccgctggccttgctgctccacgccgccaggccggacgacatccaaatgacacagagtccttctagtttgagtgcgagcgtgggggacagggtgaccattacctgcagggccagccagagcataagctcataccttaattggtaccagcaaaaaccaggtaaggcccctaagctcctgatctacgcggcctcttcacttcaatctggggtcccttcccgcttcagtggctccggcagcggcaccgacttcacgctcactatatcaagtctgcagcctgaggatctcgccacctattactgtcaacaaagttattccacccctttcacctttggaccgggcacgaaagtggatattaagggcggaggcggaagtggaggcggaggatctggcggcggaggctctgtgcacgaggtccagcttgtgcagtccggggcagaggtcaagaagcctggttctagcgtaaaagtgagttgcaaagcctcaggtgggacattttcatcctacgcgatcagttgggttagacaggctcctggtcaagggctggaatggatgggcggaattattccaatcttcggaacagcgaattacgcgcagaagttccagggtagagtaaccatcactgctgacaagtccacctccaccgcatacatggaattgtctagtctccggagcgaggatacggcggtgtattattgtgctacgttcgccctgtttggcttccgcgaacaggctttcgacatctgggggcagggcacgacagtcacggttagtagtacgcgtacgcgtggaggtggtggctcccaggttcagctggttcagtctggggccgaagtgaagaaacctggggcctctgtgaaggtgtcctgcaaggcttccggctacacctttaccagctactacatccactgggtccgacaggcccctggacaaggactggaatggatcggctgtatctaccccggcaacgtgaacaccaactacaacgagaagttcaaggaccgggccacactgaccgtggacacctctatcagcaccgcctacatggaactgagccggctgagatccgatgataccgccgtgtacttctgcaccagaagccactacggcctggactggaacttcgatgtgtggggccagggcaccaccgtgacagtttctagcggaggcggaggatctggtggcggaggaagtggcggaggcggctctgatattcagatgacacagagcccctccagcctgtctgcctctgtgggagacagagtgaccatcacctgtcacgccagccagaacatctacgtgtggctgaactggtatcagcagaagcccggcaaggcccctaagctgctgatctacaaggccagcaatctgcacaccggcgtgcccagcagattttctggctctggcagcggcaccgacttcaccctgacaatatctagcctccagccagaggacttcgccacctactattgtcagcagggccagacatacccctacaccttcggcggaggcaccaaggtggaaatcaagcatcaccaccatcaccac

SEQ ID NO: 2568 - DNA, 1560 bp, Artificial Sequence
  Synthetic Polynucleotide
atggccttaccagtgaccgccttgctcctgccgctggccttgctgctccacgccgccaggccggaccagatcgtgctgacccagtcccccgctattatgtccgcatcaccgggcgaaaaagtgacgatctcctgtagcgcttcatctagcgtctcctacatgtattggtatcaacagaaacctgggtctagcccaaagccgtggatctacagaaccagtaaccttgccagtggggtgccagcccgcttcagcggtagtggcagtggaacttcctatagcctcacaataagcaacatggaggctgaagatgccgctgcctattactgccagcagtaccacagttacccaaccacgttcggcgggggaactaagctcgaagtaaaaggcggaggcggaagtggaggcggaggatctggcggcggaggctctgaggtgcagctggtggaatctgggggcggcctggtccaacctaagggatcactcaagctctcttgtgcggccagcggattctctttcaatacctatgctatgaattgggtgagacaggcgcccggaaagggcctcgaatggatagcccatatccggtcaaaatcaaacaatttcgcaacctactatgcggactccgtgaaggaccgattttccatctcccgagatgcctccgagaatattctgttcctgcagatgaataacctcaagacagaggacaccgccatgtactactgtgtgcgccagggcggtgactttcccatggattactgggggcaggggaccagcgtgaccgtgagctctacgcgtacgcgtggaggtggtggctcccaggttcagctggttcagtctggggccgaagtgaagaaacctggggcctctgtgaaggtgtcctgcaaggcttccggctacacctttaccagctactacatccactgggtccgacaggcccctggacaaggactggaatggatcggctgtatctaccccggcaacgtgaacaccaactacaacgagaagttcaaggaccgggccacactgaccgtggacacctctatcagcaccgcctacatggaactgagccggctgagatccgatgataccgccgtgtacttctgcaccagaagccactacggcctggactggaacttcgatgtgtggggccagggcaccaccgtgacagtttctagcggaggcggaggatctggtggcggaggaagtggcggaggcggctctgatattcagatgacacagagcccctccagcctgtctgcctctgtgggagacagagtgaccatcacctgtcacgccagccagaacatctacgtgtggctgaactggtatcagcagaagcccggcaaggcccctaagctgctgatctacaaggccagcaatctgcacaccggcgtgcccagcagattttctggctctggcagcggcaccgacttcaccctgacaatatctagcctccagccagaggacttcgccacctactattgtcagcagggccagacatacccctacaccttcggcggaggcaccaaggtggaaatcaagcatcaccaccatcaccac

SEQ ID NO: 2569 - DNA, 1557 bp, Artificial Sequence
  Synthetic Polynucleotide
atggccttaccagtgaccgccttgctcctgccgctggccttgctgctccacgccgccaggccggacgacatccagatgacccagagcagcagcagcttcagcgtgagcctgggcgacagagtgaccatcacctgcatggccagcgaggacatctacatcagactggcctggtaccagcagaagcccggcaacgcccccagactgctgatcagcgccgccaccagcctggagaccggcgtgcccagcagattcagcggcagcggcagcggcaaggactacaccctgagcatcaccagcctgcagaccgaggacgtgggcacctactactgccagcagtactggagcagcccctggaccttcggcggcggcaccaagctggagatcaacggcggaggcggaagtggaggcggaggatctggcggcggaggctctgacgtgcagctgcaggagagcggccccggcctggtgaagcccagccagagcctgagcctgacctgcaccgtgaccggctacagcatcaccagcgactacacctggaactggatcagacagttccccggcaacaagctggagtggatgggctacatcacctacagcggcagcaccagctacaaccccagcctgaagagcagaaacagcatcaccagagacaccagcaagaaccagttcttcctgcagctgaacagcgtgaccaccgaggacaccgccacctactactgcgccagactgggcagaagatacacaatggactactggggccagggcaccagcgtgaccgtgagcagcacgcgtacgcgtggaggtggtggctcccaggttcagctggttcagtctggggccgaagtgaagaaacctggggcctctgtgaaggtgtcctgcaaggcttccggctacacctttaccagctactacatccactgggtccgacaggcccctggacaaggactggaatggatcggctgtatctaccccggcaacgtgaacaccaactacaacgagaagttcaaggaccgggccacactgaccgtggacacctctatcagcaccgcctacatggaactgagccggctgagatccgatgataccgccgtgtacttctgcaccagaagccactacggcctggactggaacttcgatgtgtggggccagggcaccaccgtgacagtttctagcggaggcggaggatctggtggcggaggaagtggcggaggcggctctgatattcagatgacacagagcccctccagcctgtctgcctctgtgggagacagagtgaccatcacctgtcacgccagccagaacatctacgtgtggctgaactggtatcagcagaagcccggcaaggcccctaagctgctgatctacaaggccagcaatctgcacaccggcgtgcccagcagattttctggctctggcagcggcaccgacttcaccctgacaatatctagcctccagccagaggacttcgccacctactattgtcagcagggccagacatacccctacaccttcggcggaggcaccaaggtggaaatcaagcatcaccaccatcaccac

SEQ ID NO: 2570 - DNA, 1557 bp, Artificial Sequence
  Synthetic Polynucleotide
atggccctgcctgtgacagctctgctgctgcctctggcactgctgctgcacgccgccagacctgacatccagatgacccagagcagcagcagcttcagcgtgtccctgggcgacagagtgaccatcacatgcaaggccagcgaggacatctacatccggctggcctggtatcagcagaagcccggcaacgcccccagactgctgattagcgccgccacctctctggaaaccggcatccccagcagattctccggctctggcagcggcgaggactacaccctgacaatcaccagcctccagaccgaggacgtggcaacctactactgccagcagtattggaccaccccctggacctttggcggaggcaccaagctggaaatcaagagaggcggaggcggaagtggaggcggaggatctggcggcggaggctctgatgtgcagctccaggaatctggccccggactcgtgaagcctagccagagcctgagcctgacatgcaccgtgaccggctacagcatcaccatcgactacacctggaactggatcagacagttccccggcaacaaactggaatggatgggctacatcacctacagcggcagcaccgactacaaccccagcctgaagtccagaagctccatcaccagagacacctctatgaaccagttcttcttgcagctgaacagcgtgaccaccgaggacaccgccacctactattgcgccagactgggcagaagatacgccctggactattggggccagggcaccagcgtgacagtgtcctctacgcgtacgcgtggaggtggtggctcccaggttcagctggttcagtctggggccgaagtgaagaaacctggggcctctgtgaaggtgtcctgcaaggcttccggctacacctttaccagctactacatccactgggtccgacaggcccctggacaaggactggaatggatcggctgtatctaccccggcaacgtgaacaccaactacaacgagaagttcaaggaccgggccacactgaccgtggacacctctatcagcaccgcctacatggaactgagccggctgagatccgatgataccgccgtgtacttctgcaccagaagccactacggcctggactggaacttcgatgtgtggggccagggcaccaccgtgacagtttctagcggaggcggaggatctggtggcggaggaagtggcggaggcggctctgatattcagatgacacagagcccctccagcctgtctgcctctgtgggagacagagtgaccatcacctgtcacgccagccagaacatctacgtgtggctgaactggtatcagcagaagcccggcaaggcccctaagctgctgatctacaaggccagcaatctgcacaccggcgtgcccagcagattttctggctctggcagcggcaccgacttcaccctgacaatatctagcctccagccagaggacttcgccacctactattgtcagcagggccagacatacccctacaccttcggcggaggcaccaaggtggaaatcaagcatcaccaccatcaccac

SEQ ID NO: 2571 - DNA, 1554 bp, Artificial Sequence
  Synthetic Polynucleotide
atggccttaccagtgaccgccttgctcctgccgctggccttgctgctccacgccgccaggccggacgtggtcatgacacagagcccttctagcctgtctgccagcgtgggcgacagagtgaccatcacctgtatggcctccgaggacatctacatccggctggcctggtatcagcagaagcctggaaacgcccctaagctgctgatctacgccgccacctctctggaaacaggcgtgccaagcagattttccggcagcggctctggcaccgatttcaccctgacaatatccagcctccagcctgaggacttcgccacctactactgccagcagtattggagcagcccctggacatttggcggaggcaccaaggtggaaatcaaaggcggaggcggaagtggaggcggaggatctggcggcggaggctctcaggttcagctgcaagagtctggccccggactggtcaagcctagccaaacactgagcctgacctgtaccgtgtccggctacagcatcaccagcgactacacctggaactggatcagacagcctcctggcaacggactggaatggatcggctacatcacctacagcggcagcaccagctacaaccccagcctgaaaagccgggtgctgatctccgtggacaccagcaagaatcaggtgtccctgaagctgagcagcgtgacagccgctgataccgccgtgtactactgtgccagactggggagaagatacacaatggactactggggccagggcaccaccgtgacagtttcttctacgcgtacgcgtggaggtggtggctcccaggttcagctggttcagtctggggccgaagtgaagaaacctggggcctctgtgaaggtgtcctgcaaggcttccggctacacctttaccagctactacatccactgggtccgacaggcccctggacaaggactggaatggatcggctgtatctaccccggcaacgtgaacaccaactacaacgagaagttcaaggaccgggccacactgaccgtggacacctctatcagcaccgcctacatggaactgagccggctgagatccgatgataccgccgtgtacttctgcaccagaagccactacggcctggactggaacttcgatgtgtggggccagggcaccaccgtgacagtttctagcggaggcggaggatctggtggcggaggaagtggcggaggcggctctgatattcagatgacacagagcccctccagcctgtctgcctctgtgggagacagagtgaccatcacctgtcacgccagccagaacatctacgtgtggctgaactggtatcagcagaagcccggcaaggcccctaagctgctgatctacaaggccagcaatctgcacaccggcgtgcccagcagattttctggctctggcagcggcaccgacttcaccctgacaatatctagcctccagccagaggacttcgccacctactattgtcagcagggccagacatacccctacaccttcggcggaggcaccaaggtggaaatcaagcatcaccaccatcaccac

SEQ ID NO: 2572 - DNA, 1566 bp, Artificial Sequence
  Synthetic Polynucleotide
atggccttaccagtgaccgccttgctcctgccgctggccttgctgctccacgccgccaggccggagatcgtgctgacacagtctcccgccacactgtcactgtctccaggcgaaagagccacactgagctgtagcgccagcagcagcgtgtcctacatgtactggtatcagcagaagcccggacaggcccctagactgctgatctacagaaccagcaacctggcctctggcatccccgccagattttctggctctggcagcggcaccgatttcaccctgaccataagcagcctggaacctgaggacttcgccgtgtactactgccagcagtaccacagctaccccaccacctttggacagggcaccaaggtggaaatcaagcggacagttggcggaggcggaagtggaggcggaggatctggcggcggaggctctgaagtgcagctggttgaatcaggtggcggcctggttcaacctggcggatctctgagactgtcttgtgccgccagcggcttcagcttcaacacctacgccatgaactgggtccgacaggctcctggcaaaggactggaatgggtgtcccacatcagaagcaagagcaacaacttcgccacctactacgccgacagcgtgaaggacagattcaccatcagccgggacaacgccaagaacagcctgtacctccagatgaactccctgagagccgaggacaccgccgtgtattattgcgccagacaaggcggcgacttccctatggattattggggccagggcaccctggtcaccgtttcttctacgcgtacgcgtggaggtggtggctcccaggttcagctggttcagtctggggccgaagtgaagaaacctggggcctctgtgaaggtgtcctgcaaggcttccggctacacctttaccagctactacatccactgggtccgacaggcccctggacaaggactggaatggatcggctgtatctaccccggcaacgtgaacaccaactacaacgagaagttcaaggaccgggccacactgaccgtggacacctctatcagcaccgcctacatggaactgagccggctgagatccgatgataccgccgtgtacttctgcaccagaagccactacggcctggactggaacttcgatgtgtggggccagggcaccaccgtgacagtttctagcggaggcggaggatctggtggcggaggaagtggcggaggcggctctgatattcagatgacacagagcccctccagcctgtctgcctctgtgggagacagagtgaccatcacctgtcacgccagccagaacatctacgtgtggctgaactggtatcagcagaagcccggcaaggcccctaagctgctgatctacaaggccagcaatctgcacaccggcgtgcccagcagattttctggctctggcagcggcaccgacttcaccctgacaatatctagcctccagccagaggacttcgccacctactattgtcagcagggccagacatacccctacaccttcggcggaggcaccaaggtggaaatcaagcatcaccaccatcaccac

SEQ ID NO: 2573 - DNA, 1554 bp, Artificial Sequence
  Synthetic Polynucleotide
atggccttaccagtgaccgccttgctcctgccgctggccttgctgctccacgccgccaggccggacgtggtcatgacacagagcccttctagcctgtctgccagcgtgggcgacagagtgaccatcacctgtaaagccagcgaggacatctacatccggctggcctggtatcagcagaagcctggaaaggcccctaagctgctgatctacgccgccacctctctggaaacaggcgtgccaagcagattttccggcagcggctctggcaccgatttcaccctgacaatatccagcctccagcctgaggacttcgccacctactactgccagcagtattggaccacaccttggacctttggcggaggcaccaaggtggaaatcaaaggcggaggcggaagtggaggcggaggatctggcggcggaggctctcaggtgcagctccaagagtctggccctggactggtcaagcctagccagacactgagcctgacctgtaccgtgtccggctacagcatcaccatcgactacacctggaactggatcagacagcctcctggcaaaggactggaatggatcggctacatcacctacagcggcagcaccgactacaaccccagcctgaaaagccgggtgctgatctccgtggacaccagcaagaatcaggtgtccctgaagctgagcagcgtgacagccgctgataccgccgtgtactactgtgccagactgggcagaagatacgccctggattattggggccagggcaccaccgtgacagtgtcatctacgcgtacgcgtggaggtggtggctcccaggttcagctggttcagtctggggccgaagtgaagaaacctggggcctctgtgaaggtgtcctgcaaggcttccggctacacctttaccagctactacatccactgggtccgacaggcccctggacaaggactggaatggatcggctgtatctaccccggcaacgtgaacaccaactacaacgagaagttcaaggaccgggccacactgaccgtggacacctctatcagcaccgcctacatggaactgagccggctgagatccgatgataccgccgtgtacttctgcaccagaagccactacggcctggactggaacttcgatgtgtggggccagggcaccaccgtgacagtttctagcggaggcggaggatctggtggcggaggaagtggcggaggcggctctgatattcagatgacacagagcccctccagcctgtctgcctctgtgggagacagagtgaccatcacctgtcacgccagccagaacatctacgtgtggctgaactggtatcagcagaagcccggcaaggcccctaagctgctgatctacaaggccagcaatctgcacaccggcgtgcccagcagattttctggctctggcagcggcaccgacttcaccctgacaatatctagcctccagccagaggacttcgccacctactattgtcagcagggccagacatacccctacaccttcggcggaggcaccaaggtggaaatcaagcatcaccaccatcaccac

SEQ ID NO: 2574 - DNA, 1557 bp, Artificial Sequence
  Synthetic Polynucleotide
atggccttaccagtgaccgccttgctcctgccgctggccttgctgctccacgccgccaggccggacatccagatgacacagtctccggcgtcactgtccgcctccgtgggggagactgtgactattatttgtagggcatcagttaacatctactcttatttggcctggtaccagcagaagcaaggcaagagtcctcagctgctggtgtataatgcgaagatcctggcagagggcgtgccgagccggttctccggcagcggctcaggtacccaattttccctcaagatcaattcactgcagccagaggactttggcagttactattgtcaacaccactacggcacattcactttcgggtccggtacaaaattggagattaagcgaggcggaggcggaagtggaggcggaggatctggcggcggaggctctcaggtacagttgaaagaaagcgggcctggactggtagcgccttcccaatctctctccatcacgtgcaccatctctggcttctccctgacttcctatggagttcactgggtgaggcagccccccggcaagggactggaatggctggtcgtcatctggtccgacgggtccacaacctacaactccgctctgaaaagtcggctctctatttctaaagataatagcaagagccaggtgtttctgaaaatgaactctctgcagaccgatgatacggccatttactactgcgcttcacactatggctcaaccttggcattcgcttcctggggccacggaacactggtgaccgtttccgcagccacgcgtacgcgtggaggtggtggctcccaggttcagctggttcagtctggggccgaagtgaagaaacctggggcctctgtgaaggtgtcctgcaaggcttccggctacacctttaccagctactacatccactgggtccgacaggcccctggacaaggactggaatggatcggctgtatctaccccggcaacgtgaacaccaactacaacgagaagttcaaggaccgggccacactgaccgtggacacctctatcagcaccgcctacatggaactgagccggctgagatccgatgataccgccgtgtacttctgcaccagaagccactacggcctggactggaacttcgatgtgtggggccagggcaccaccgtgacagtttctagcggaggcggaggatctggtggcggaggaagtggcggaggcggctctgatattcagatgacacagagcccctccagcctgtctgcctctgtgggagacagagtgaccatcacctgtcacgccagccagaacatctacgtgtggctgaactggtatcagcagaagcccggcaaggcccctaagctgctgatctacaaggccagcaatctgcacaccggcgtgcccagcagattttctggctctggcagcggcaccgacttcaccctgacaatatctagcctccagccagaggacttcgccacctactattgtcagcagggccagacatacccctacaccttcggcggaggcaccaaggtggaaatcaagcatcaccaccatcaccac

SEQ ID NO: 2575 - DNA, 1581 bp, Artificial Sequence
  Synthetic Polynucleotide
atggccttaccagtgaccgccttgctcctgccgctggccttgctgctccacgccgccaggccggacattgtgatgacccagtctcacaaattcatgtccacatcagtaggagacagggtcagcgtcacctgcaaggccagtcagaatgtgggtaataatgtagcctggtatcaacagaaaccagggcaatctcctaaagtactgatttactcggcatcctaccggtacagtggagtccctgatcgcttcacaggcagtggatctgggacagatttcactctcaccatcagtaatgtgcagtctgaagacttggcagagtatttctgtcagcaatataacacctatccattcacgttcggctcggggacaaagttggaaataaaaggcggaggcggaagtggaggcggaggatctggcggcggaggctctgaggtacagctggaggaaagcggtggaggactggtgcaacctggagggtctatgaagctctcttgcgtagcttctgggttcacgttctccaattactggatgaactgggtgcggcagtcccccgagaaaggcctggaatgggtagcagaaattcggttcaagtcccataactatgctacacactttgccgagtctgtcaaaggccggttcactattagtcgagacgacagcaagtcttcagtctacctgcagatgaataacttgcgggcagaggacacaggtatctactactgcaccaggagaatcggcaactccgactatgactggtggtactttgacgtctggggagcaggcaccagcgtgacggtgagttcagcctcaacgcgtacgcgtggaggtggtggctcccaggttcagctggttcagtctggggccgaagtgaagaaacctggggcctctgtgaaggtgtcctgcaaggcttccggctacacctttaccagctactacatccactgggtccgacaggcccctggacaaggactggaatggatcggctgtatctaccccggcaacgtgaacaccaactacaacgagaagttcaaggaccgggccacactgaccgtggacacctctatcagcaccgcctacatggaactgagccggctgagatccgatgataccgccgtgtacttctgcaccagaagccactacggcctggactggaacttcgatgtgtggggccagggcaccaccgtgacagtttctagcggaggcggaggatctggtggcggaggaagtggcggaggcggctctgatattcagatgacacagagcccctccagcctgtctgcctctgtgggagacagagtgaccatcacctgtcacgccagccagaacatctacgtgtggctgaactggtatcagcagaagcccggcaaggcccctaagctgctgatctacaaggccagcaatctgcacaccggcgtgcccagcagattttctggctctggcagcggcaccgacttcaccctgacaatatctagcctccagccagaggacttcgccacctactattgtcagcagggccagacatacccctacaccttcggcggaggcaccaaggtggaaatcaagcatcaccaccatcaccac

SEQ ID NO: 2576 - DNA, 1569 bp, Artificial Sequence
  Synthetic Polynucleotide
atggccttaccagtgaccgccttgctcctgccgctggccttgctgctccacgccgccaggccggacatcgtgatgacccagagccccgatagcctggccgtgtctctgggagagagagccaccatcaactgccgggccagcaagagcgtgtccaccagcggctacagcttcatgcactggtatcagcagaagcccggccagccccccaagctgctgatctacctggcctccaacctggaaagcggcgtgcccgatagattcagcggcagcggctctggcaccgacttcaccctgaccatcagttctcttcaggccgaggacgtggccgtgtactactgccagcacagcagagaggtgccctggacattcggccagggcacaaaggtggaaatcaagcggggcggaggcggaagtggaggcggaggatctggcggcggaggctctcaggtgcagctggtgcagtctggggccgaagtgaagaaacctggggccagcgtgaaggtgtcctgcaaggccagcggatacacctttaccaactacggcatgaactgggtgcgccaggcccctggacagggcctggaatggatgggctggatcaacacctacaccggcgagcccacatacgccgacgccttcaagggcagattcgccttcagcctggacaccagcacctccaccgcctacctccagatcaacagcctgcggagcgacgacaccgccgtgtattattgcgccagagattacggcgactacgggatggactattggggccagggaaccaccgtgaccgtgtcctctacgcgtacgcgtggaggtggtggctcccaggttcagctggttcagtctggggccgaagtgaagaaacctggggcctctgtgaaggtgtcctgcaaggcttccggctacacctttaccagctactacatccactgggtccgacaggcccctggacaaggactggaatggatcggctgtatctaccccggcaacgtgaacaccaactacaacgagaagttcaaggaccgggccacactgaccgtggacacctctatcagcaccgcctacatggaactgagccggctgagatccgatgataccgccgtgtacttctgcaccagaagccactacggcctggactggaacttcgatgtgtggggccagggcaccaccgtgacagtttctagcggaggcggaggatctggtggcggaggaagtggcggaggcggctctgatattcagatgacacagagcccctccagcctgtctgcctctgtgggagacagagtgaccatcacctgtcacgccagccagaacatctacgtgtggctgaactggtatcagcagaagcccggcaaggcccctaagctgctgatctacaaggccagcaatctgcacaccggcgtgcccagcagattttctggctctggcagcggcaccgacttcaccctgacaatatctagcctccagccagaggacttcgccacctactattgtcagcagggccagacatacccctacaccttcggcggaggcaccaaggtggaaatcaagcatcaccaccatcaccac

SEQ ID NO: 2577 - DNA, 1557 bp, Artificial Sequence
  Synthetic Polynucleotide
atggccttaccagtgaccgccttgctcctgccgctggccttgctgctccacgccgccaggccggacatcgtgatgacccagacccccctgaccctgagcgtgacaatcggacagcctgccagcatctcctgcaagagcagccagagcctgctggacagcgacggcaagacctacctgaactggctgctgcagaggccaggccagagccccgagagactgatctacctggtgtccaagctggactccggcgtgcccgatagattcacaggcagcggctccggcaccgacttcaccctgaagatcagccgggtggaagccgaggacctgggcgtgtactgttgttggcagggcacccacttcccttacaccttcggcggagggaccaaggtggaaatcaagggcggcggaggcggaagtggaggcggaggatctggcggcggaggctctcaggtgcaactgcagcagcctggcgctgaacttgtgcggccaggcgcctctgtgaagctgagctgtaaagccagcggctacaccttcaccagctactggatgaactgggtcaagcagcgcccaggccagggcctggaatggatcggaatgatcgaccccagcgacagcgagacacactacaaccacatcttcaaggacaaggccaccctgaccgtggacaagtccagcagcacagcctacctgcaactgtccagcctgaccagcgaggacagcgccgtgtactactgcgcccggaacctgtatctgtggggccagggaacaagcgtgaccgtgtctagcacgcgtacgcgtggaggtggtggctcccaggttcagctggttcagtctggggccgaagtgaagaaacctggggcctctgtgaaggtgtcctgcaaggcttccggctacacctttaccagctactacatccactgggtccgacaggcccctggacaaggactggaatggatcggctgtatctaccccggcaacgtgaacaccaactacaacgagaagttcaaggaccgggccacactgaccgtggacacctctatcagcaccgcctacatggaactgagccggctgagatccgatgataccgccgtgtacttctgcaccagaagccactacggcctggactggaacttcgatgtgtggggccagggcaccaccgtgacagtttctagcggaggcggaggatctggtggcggaggaagtggcggaggcggctctgatattcagatgacacagagcccctccagcctgtctgcctctgtgggagacagagtgaccatcacctgtcacgccagccagaacatctacgtgtggctgaactggtatcagcagaagcccggcaaggcccctaagctgctgatctacaaggccagcaatctgcacaccggcgtgcccagcagattttctggctctggcagcggcaccgacttcaccctgacaatatctagcctccagccagaggacttcgccacctactattgtcagcagggccagacatacccctacaccttcggcggaggcaccaaggtggaaatcaagcatcaccaccatcaccac

SEQ ID NO: 2578 - DNA, 1551 bp, Artificial Sequence
  Synthetic Polynucleotide
atggccttaccagtgaccgccttgctcctgccgctggccttgctgctccacgccgccaggccggacatccagatgacccagagccctgccagcctgtccgtgtctgtgggcgagacagtgaccatcacctgtcgggccagcgagaacatctacagcaacctggcctggtatcagcagaagcagggcaagagcccccaactgctggtgtacgccgccaccaatctggccgatggcgtgcccagcagattttccggctctggcagcggcacccagtacagcctgaagatcaacagcctccagagcgaggacttcggcagctactactgccagcacttctggggcacctggacctttggaggaggcaccaccctggaaatcaagggcggaggcggaagtggaggcggaggatctggcggcggaggctctgaagtgcaactccagcagagcggccctgagcttgtgaagcctggcgcttccgtgaagatgagctgcaaggccagcggctacaccttcaccgactactacatgaagtggatgaagcagagccacggcaagtccctggaatggatcggcgacatcaaccccaacaacggcggcaccacctacaaccagaagttcaagggcaaggccaccctgaccgtggacaagagcagcagcaccgcctacatgcaactgaacagcctgaccagcgaggacagcgccgtgtactactgcgccagagactacggctacggctatttcgactactggggccagggcacaaccctgacagtgtcctctacgcgtacgcgtggaggtggtggctcccaggttcagctggttcagtctggggccgaagtgaagaaacctggggcctctgtgaaggtgtcctgcaaggcttccggctacacctttaccagctactacatccactgggtccgacaggcccctggacaaggactggaatggatcggctgtatctaccccggcaacgtgaacaccaactacaacgagaagttcaaggaccgggccacactgaccgtggacacctctatcagcaccgcctacatggaactgagccggctgagatccgatgataccgccgtgtacttctgcaccagaagccactacggcctggactggaacttcgatgtgtggggccagggcaccaccgtgacagtttctagcggaggcggaggatctggtggcggaggaagtggcggaggcggctctgatattcagatgacacagagcccctccagcctgtctgcctctgtgggagacagagtgaccatcacctgtcacgccagccagaacatctacgtgtggctgaactggtatcagcagaagcccggcaaggcccctaagctgctgatctacaaggccagcaatctgcacaccggcgtgcccagcagattttctggctctggcagcggcaccgacttcaccctgacaatatctagcctccagccagaggacttcgccacctactattgtcagcagggccagacatacccctacaccttcggcggaggcaccaaggtggaaatcaagcatcaccaccatcaccac

SEQ ID NO: 2579 - DNA, 1563 bp, Artificial Sequence
  Synthetic Polynucleotide
atggccttaccagtgaccgccttgctcctgccgctggccttgctgctccacgccgccaggccgcagtctgtgctgacacagcctccatctgcctctggcacacctggacagagagtgaccatcagctgtagcggcagcagaagcaacgtcggcggcaactacgtgttctggtatcagcaggtcccaggcgctacccctaagctgctgatctacagaagcaatcagcggcctagcggcgtgcccgatagatttgccggaagcaagagcggcagctctgccagccttgccatctctggactgagaagcgaggacgaggccgactactactgtgccacctgggatgatagcctgagcggcttcgtgtttggcaccggcaccaaagtgacagtgcttggtggcggaggcggaagtggaggcggaggatctggcggcggaggctctgaagttcagctggttgaatctggcggcggactggttaagcctggcggatctctgagactgtcttgtgccgccagcggcttcaccttcagcgattactacatgagctggatcagacaggcccctggcaaaggactggaatgggtgtcctacatcagcagcagcggctccaccatctactacgccgatagcgtgaagggcagattcaccatcagccgggacaacgccaagaacagcctgtacctccagatgaactccctgagagccgaggacaccgccgtgtactattgcgccagaggctacggcaaagcctacgatcaatggggccagggcacactggtcaccgtttcttctacgcgtacgcgtggaggtggtggctcccaggttcagctggttcagtctggggccgaagtgaagaaacctggggcctctgtgaaggtgtcctgcaaggcttccggctacacctttaccagctactacatccactgggtccgacaggcccctggacaaggactggaatggatcggctgtatctaccccggcaacgtgaacaccaactacaacgagaagttcaaggaccgggccacactgaccgtggacacctctatcagcaccgcctacatggaactgagccggctgagatccgatgataccgccgtgtacttctgcaccagaagccactacggcctggactggaacttcgatgtgtggggccagggcaccaccgtgacagtttctagcggaggcggaggatctggtggcggaggaagtggcggaggcggctctgatattcagatgacacagagcccctccagcctgtctgcctctgtgggagacagagtgaccatcacctgtcacgccagccagaacatctacgtgtggctgaactggtatcagcagaagcccggcaaggcccctaagctgctgatctacaaggccagcaatctgcacaccggcgtgcccagcagattttctggctctggcagcggcaccgacttcaccctgacaatatctagcctccagccagaggacttcgccacctactattgtcagcagggccagacatacccctacaccttcggcggaggcaccaaggtggaaatcaagcatcaccaccatcaccac

SEQ ID NO: 2580 - DNA, 1560 bp, Artificial Sequence
  Synthetic Polynucleotide
atggccttaccagtgaccgccttgctcctgccgctggccttgctgctccacgccgccaggccgcagtctgtggtcacacagccacctagcatgtctgccgctccaggccagcaagtgaccatctcttgtagcggcggcaacagcaacatcgagcggaactacgtgtcctggtatctgcaactgcctggcacagcccctaagctggtcatcttcgacaacgacagacggcccagcggcatccccgatagattttctggcagcaagagcggcaccagcgccacactgggaattaccggacttcagacaggcgacgaggccgactactactgtggcacatgggactctagcctgagaggctgggttttcggcggaggcacaaagctgacagtgcttggtggcggaggcggaagtggaggcggaggatctggcggcggaggctctgaagtgcagctcgttgagtctggcggcggactgattcaacctggcggaagcctgagactgagctgtgccgcttccggcttcaccttcagcaactacgccatgaactgggttcgacaggcccctggcaaaggactggaatgggtgtccaccatcaacggcagaggcagcagcaccatctacgccgattctgtgaagggcagattcaccatcagccgggacaacagcaagaacaccctgtacctccagatgaactccctgagagccgaggacaccgccacctattactgtgcccggtacatcagcagaggactgggcgattcttggggccagggcacactggttacagtgacgcgtacgcgtggaggtggtggctcccaggttcagctggttcagtctggggccgaagtgaagaaacctggggcctctgtgaaggtgtcctgcaaggcttccggctacacctttaccagctactacatccactgggtccgacaggcccctggacaaggactggaatggatcggctgtatctaccccggcaacgtgaacaccaactacaacgagaagttcaaggaccgggccacactgaccgtggacacctctatcagcaccgcctacatggaactgagccggctgagatccgatgataccgccgtgtacttctgcaccagaagccactacggcctggactggaacttcgatgtgtggggccagggcaccaccgtgacagtttctagcggaggcggaggatctggtggcggaggaagtggcggaggcggctctgatattcagatgacacagagcccctccagcctgtctgcctctgtgggagacagagtgaccatcacctgtcacgccagccagaacatctacgtgtggctgaactggtatcagcagaagcccggcaaggcccctaagctgctgatctacaaggccagcaatctgcacaccggcgtgcccagcagattttctggctctggcagcggcaccgacttcaccctgacaatatctagcctccagccagaggacttcgccacctactattgtcagcagggccagacatacccctacaccttcggcggaggcaccaaggtggaaatcaagcatcaccaccatcaccac

SEQ ID NO: 2581 - DNA, 1569 bp, Artificial Sequence
  Synthetic Polynucleotide
atggccttaccagtgaccgccttgctcctgccgctggccttgctgctccacgccgccaggccggacatcgtgctgacccagagccctctgagcctggccgtgtctctgggacagcctgccatcatcagctgcaaggccagccagagcgtgtcctttgccggcacctctctgatgcactggtatcaccagaagcccggccagcagcccagactgctgatctacagagccagcaacctggaagccggcgtgcccgatagattttccggcagcggcagcaagaccgacttcaccctgaccatcagccccgtggaagccgaagatgccgccacctactactgccagcagagcagagagtacccctacaccttcggcggaggcaccaagctggaaatcaagaggggcggaggcggaagtggaggcggaggatctggcggcggaggctctcaggtccaactggtgcagagcggagccgaggtcgtgaagcctggcgcttccgtgaagattagctgcaaagccagcggctacacctttaccggctactttatgaactgggtcaagcagagccctggccagagcctggaatggatcggcagaatccacccctacgacggcgacaccttctacaaccagaagttccagggcaaggccaccctgacagtggacaagagcagcaacaccgcccacatggaactgctgagcctgaccagcgaggacttcgccgtgtactactgcaccagatacgacggcagccgggctatggactattggggccagggcaccaccgtgaccgtgtctagtacgcgtacgcgtggaggtggtggctcccaggttcagctggttcagtctggggccgaagtgaagaaacctggggcctctgtgaaggtgtcctgcaaggcttccggctacacctttaccagctactacatccactgggtccgacaggcccctggacaaggactggaatggatcggctgtatctaccccggcaacgtgaacaccaactacaacgagaagttcaaggaccgggccacactgaccgtggacacctctatcagcaccgcctacatggaactgagccggctgagatccgatgataccgccgtgtacttctgcaccagaagccactacggcctggactggaacttcgatgtgtggggccagggcaccaccgtgacagtttctagcggaggcggaggatctggtggcggaggaagtggcggaggcggctctgatattcagatgacacagagcccctccagcctgtctgcctctgtgggagacagagtgaccatcacctgtcacgccagccagaacatctacgtgtggctgaactggtatcagcagaagcccggcaaggcccctaagctgctgatctacaaggccagcaatctgcacaccggcgtgcccagcagattttctggctctggcagcggcaccgacttcaccctgacaatatctagcctccagccagaggacttcgccacctactattgtcagcagggccagacatacccctacaccttcggcggaggcaccaaggtggaaatcaagcatcaccaccatcaccac

SEQ ID NO: 2582 - DNA, 1551 bp, Artificial Sequence
  Synthetic Polynucleotide
atggccttaccagtgaccgccttgctcctgccgctggccttgctgctccacgccgccaggccggacatccagatgacacagactacatcctccctgtctgcctctctgggagacagagtcaccatcagttgcagggcaagtcaggacattagtaaatatttaaattggtatcagcagaaaccagatggaactgttaaactcctgatctaccatacatcaagattacactcaggagtcccatcaaggttcagtggcagtgggtctggaacagattattctctcaccattagcaacctggagcaagaagatattgccacttacttttgccaacagggtaatacgcttccgtacacgttcggaggggggaccaagctggagatcacaggtggcggtggctcgggcggtggtgggtcgggtggcggcggatctgaggtgaaactgcaggagtcaggacctggcctggtggcgccctcacagagcctgtccgtcacatgcactgtctcaggggtctcattacccgactatggtgtaagctggattcgccagcctccacgaaagggtctggagtggctgggagtaatatggggtagtgaaaccacatactataattcagctctcaaatccagactgaccatcatcaaggacaactccaagagccaagttttcttaaaaatgaacagtctgcaaactgatgacacagccatttactactgtgccaaacattattactacggtggtagctatgctatggactactggggtcaaggaacctcagtcaccgtctcctcacgcgtaacgcgtggaggtggtggctccgaagtgcagctggttcagtctggggccgaagtgaagaagcctggcgagagcctgcggatcagctgtaaaggcagcggctacagcttcagcacctactggatctcttgggtccgacagatgcccggcaaaggactggaatggatgggcaagatctaccccggcgacagctacaccaactacagccctagcttccagggccaagtgaccatcagcgccgacaagagcatcagcacagcctacctccagtggtcctctctgaaggccagcgacaccgccatgtactactgtgccagaggctacggcatcttcgactattggggccagggcaccctggtcacagtttctagcggaggcggaggatctggtggcggaggaagtggcggaggcggttcttcttatgagctgacccagcctccaagcgtgtccgtgtctcctggacagacagccagcatcacctgtagcggcgacaacatcggcgatcagtacgcccactggtatcagcagaagcccggacagtctcccgtgctggtcatctaccaggacaagaacagacccagcggcatccccgagagattcagcggcagcaatagcggcaataccgccacactgacaatcagcggcacccaggctatggacgaggccgattactactgcgccacctacacaggcttcggcagcctggctgtttttggaggcggcaccaaactgaccgtgctgcatcaccaccatcaccac

SEQ ID NO: 2583 - DNA, 1551 bp, Artificial Sequence
  Synthetic Polynucleotide
atggccttaccagtgaccgccttgctcctgccgctggccttgctgctccacgccgccaggccggagatcgtgatgacccagagccctgccaccctgtctctgagccctggcgaaagagccaccctgagctgtagagccagccaggacatcagcaagtacctgaactggtatcagcagaagcccggccaggcccccagactgctgatctaccacaccagcagactgcacagcggcatccccgccagattttctggctctggcagcggcaccgactacaccctgacaatcagcagcctccagcccgaggacttcgccgtgtacttctgtcagcaaggcaacaccctgccctacaccttcggccagggcaccaagctggaaatcaagggcggaggcggaagtggaggcggaggatctggcggcggaggctctcaggtgcaactccaggaatctggccctggcctcgtgaagcccagcgagacactgagcctgacctgtaccgtgtccggcgtgtccctgcctgactatggcgtgtcctggatcagacagccccctggcaagggcctggaatggatcggagtgatttggggcagcgaaaccacctactacaacagctccctgaagtccagagtgaccatctccaaggacaactccaagaaccaggtgtccctgaagctgagcagcgtgacagccgccgacaccgccgtgtattactgcgccaagcactactactacggcggcagctacgctatggactactggggccagggaaccctcgtgaccgtgtctagtacgcgtacgcgtggaggtggtggctccgaagtgcagctggttcagtctggggccgaagtgaagaagcctggcgagagcctgcggatcagctgtaaaggcagcggctacagcttcagcacctactggatctcttgggtccgacagatgcccggcaaaggactggaatggatgggcaagatctaccccggcgacagctacaccaactacagccctagcttccagggccaagtgaccatcagcgccgacaagagcatcagcacagcctacctccagtggtcctctctgaaggccagcgacaccgccatgtactactgtgccagaggctacggcatcttcgactattggggccagggcaccctggtcacagtttctagcggaggcggaggatctggtggcggaggaagtggcggaggcggttcttcttatgagctgacccagcctccaagcgtgtccgtgtctcctggacagacagccagcatcacctgtagcggcgacaacatcggcgatcagtacgcccactggtatcagcagaagcccggacagtctcccgtgctggtcatctaccaggacaagaacagacccagcggcatccccgagagattcagcggcagcaatagcggcaataccgccacactgacaatcagcggcacccaggctatggacgaggccgattactactgcgccacctacacaggcttcggcagcctggctgtttttggaggcggcaccaaactgaccgtgctgcatcaccaccatcaccac

SEQ ID NO: 2584 - DNA, 1551 bp, Artificial Sequence
  Synthetic Polynucleotide
atggccttaccagtgaccgccttgctcctgccgctggccttgctgctccacgccgccaggccggagatcgtgatgacccagagccctgccaccctgtctctgagccctggcgaaagagccaccctgagctgtagagccagccaggacatcagcaagtacctgaactggtatcagcagaagcccggccaggcccccagactgctgatctaccacaccagcagactgcacagcggcatccccgccagattttctggctctggcagcggcaccgactacaccctgacaatcagcagcctccagcccgaggacttcgccgtgtacttctgtcagcaaggcaacaccctgccctacaccttcggccagggcaccaagctggaaatcaagggcggaggcggaagtggaggcggaggatctggcggcggaggctctcaggtgcaactccaggaatctggccctggcctcgtgaagcccagcgagacactgagcctgacctgtaccgtgtccggcgtgtccctgcctgactatggcgtgtcctggatcagacagccccctggcaagggcctggaatggatcggagtgatttggggcagcgaaaccacctactaccaaagctccctgaagtccagagtgaccatctccaaggacaactccaagaaccaggtgtccctgaagctgagcagcgtgacagccgccgacaccgccgtgtattactgcgccaagcactactactacggcggcagctacgctatggactactggggccagggaaccctcgtgaccgtgtctagtacgcgtacgcgtggaggtggtggctccgaagtgcagctggttcagtctggggccgaagtgaagaagcctggcgagagcctgcggatcagctgtaaaggcagcggctacagcttcagcacctactggatctcttgggtccgacagatgcccggcaaaggactggaatggatgggcaagatctaccccggcgacagctacaccaactacagccctagcttccagggccaagtgaccatcagcgccgacaagagcatcagcacagcctacctccagtggtcctctctgaaggccagcgacaccgccatgtactactgtgccagaggctacggcatcttcgactattggggccagggcaccctggtcacagtttctagcggaggcggaggatctggtggcggaggaagtggcggaggcggttcttcttatgagctgacccagcctccaagcgtgtccgtgtctcctggacagacagccagcatcacctgtagcggcgacaacatcggcgatcagtacgcccactggtatcagcagaagcccggacagtctcccgtgctggtcatctaccaggacaagaacagacccagcggcatccccgagagattcagcggcagcaatagcggcaataccgccacactgacaatcagcggcacccaggctatggacgaggccgattactactgcgccacctacacaggcttcggcagcctggctgtttttggaggcggcaccaaactgaccgtgctgcatcaccaccatcaccac

SEQ ID NO: 2585 - DNA, 1554 bp, Artificial Sequence
  Synthetic Polynucleotide
atggccttaccagtgaccgccttgctcctgccgctggccttgctgctccacgccgccaggccggacgagatcgtgctgacacagagccccgccaccctgtcactgtctccaggcgaaagagccaccctgagctgtagcgccagcagcagcgtgtcctacatgcactggtatcagcagaagcccggccaggcccccagactgctgatctacgataccagcaagctggcctccggcatccccgccagattttctggcagcggctccggcaccgacttcaccctgacaatcagcagcctggaacccgaggacgtggccgtgtactactgttttcaaggcagcgtgtaccccttcaccttcggccagggcaccaagctggaaatcaagagaggtggcggtggctcgggcggtggtgggtcgggtggcggcggatctcaggtgcagctccaggaatctggccctggcctcgtgaagcctagccagaccctgagcctgacctgtaccgtgtctggcggcagcatcagcacaagcggcatgggcgtgggctggatcagacagcaccctggcaagggcctggaatggatcggccacatttggtgggacgacgacaagcggtacaaccccgccctgaagtccagagtgaccatcagcgtggacaccagcaagaaccagttcagcctgaagctgagcagcgtgacagccgccgataccgccgtgtattattgcgcccggatggaactgtggtcctactacttcgactactggggccagggaaccctcgtgaccgtgtctagtacgcgtacgcgtggaggtggtggctccgaagtgcagctggttcagtctggggccgaagtgaagaagcctggcgagagcctgcggatcagctgtaaaggcagcggctacagcttcagcacctactggatctcttgggtccgacagatgcccggcaaaggactggaatggatgggcaagatctaccccggcgacagctacaccaactacagccctagcttccagggccaagtgaccatcagcgccgacaagagcatcagcacagcctacctccagtggtcctctctgaaggccagcgacaccgccatgtactactgtgccagaggctacggcatcttcgactattggggccagggcaccctggtcacagtttctagcggaggcggaggatctggtggcggaggaagtggcggaggcggttcttcttatgagctgacccagcctccaagcgtgtccgtgtctcctggacagacagccagcatcacctgtagcggcgacaacatcggcgatcagtacgcccactggtatcagcagaagcccggacagtctcccgtgctggtcatctaccaggacaagaacagacccagcggcatccccgagagattcagcggcagcaatagcggcaataccgccacactgacaatcagcggcacccaggctatggacgaggccgattactactgcgccacctacacaggcttcggcagcctggctgtttttggaggcggcaccaaactgaccgtgctgcatcaccaccatcaccac

SEQ ID NO: 2586 - DNA, 1575 bp, Artificial Sequence
  Synthetic Polynucleotide
atggccctgcctgtgacagctctgctgctgcctctggcactgctgctgcacgccgccagacctgacatccagctgacacagagccctgccagcctggccgtgtctctgggacagagagccaccatcagctgcaaggccagccagagcgtggactacgacggcgacagctacctgaactggtatcagcagatccccggccagccccccaagctgctgatctacgatgccagcaacctggtgtccggcatcccccctagattttccggcagcggctccggcaccgacttcaccctgaatatccaccccgtggaaaaggtggacgccgccacctaccactgccagcagagcaccgaagatccctggacctttggcggaggcaccaagctggaaatcaagggaggcggaggaagtggcggcggaggatctgggggaggcggaagccaggtacagctccaacagtcaggggccgagctggtacgcccagggtccagcgtcaaaatatcatgtaaggcatctggctacgccttcagctcttactggatgaattgggtgaaacaacggccaggccagggactggagtggattggtcaaatttggccaggagacggggacacaaattacaacggaaaattcaagggaaaggccacacttaccgccgatgaaagtagttcaaccgcttatatgcagctgtcctccctcgcttctgaggactctgctgtgtacttttgcgcacgccgagaaaccaccactgtgggaagatactactacgctatggattattggggacagggcacaaccgtgaccgttagcagtacgcgtacgcgtggaggtggtggctccgaagtgcagctggttcagtctggggccgaagtgaagaagcctggcgagagcctgcggatcagctgtaaaggcagcggctacagcttcagcacctactggatctcttgggtccgacagatgcccggcaaaggactggaatggatgggcaagatctaccccggcgacagctacaccaactacagccctagcttccagggccaagtgaccatcagcgccgacaagagcatcagcacagcctacctccagtggtcctctctgaaggccagcgacaccgccatgtactactgtgccagaggctacggcatcttcgactattggggccagggcaccctggtcacagtttctagcggaggcggaggatctggtggcggaggaagtggcggaggcggttcttcttatgagctgacccagcctccaagcgtgtccgtgtctcctggacagacagccagcatcacctgtagcggcgacaacatcggcgatcagtacgcccactggtatcagcagaagcccggacagtctcccgtgctggtcatctaccaggacaagaacagacccagcggcatccccgagagattcagcggcagcaatagcggcaataccgccacactgacaatcagcggcacccaggctatggacgaggccgattactactgcgccacctacacaggcttcggcagcctggctgtttttggaggcggcaccaaactgaccgtgctgcatcaccaccatcaccac

SEQ ID NO: 2587 - DNA, 1626 bp, Artificial Sequence
  Synthetic Polynucleotide
atggccttaccagtgaccgccttgctcctgccgctggccttgctgctccacgccgccaggccgatcaacatctacaacgccgagcctgccaatcctagcgagaagaacagccccgaattcgacatcgtgatgacacagagccccgccacactgtcactgtctccaggcgaaagagccacactgagctgtcggagcagcaagagcctccagaacgtgaacggcaacacctacctgtactggttccagcagaagcccggccagtctcctcagctcctgatctacagaatgagcaacctgaacagcggcgtgcccgacagattttctggcagcggaagcggcaccgagttcaccctgaccataagcagcctggaacctgaggacttcgccgtgtactactgtatgcagcacctggaataccccatcaccttcggagccggcaccaagctggaaatcaaaggcggaggcggaagtggaggcggaggatctggcggcggaggctctgaagtgcaactggttgaatctggcggcggactggttaagcctggcggatctctgaagctgagctgtgccgccagcggctacacctttaccagctacgtgatgcactgggtccgacaggcccctggcaaaggacttgagtggatcggctacatcaacccctacaacgatggcaccaagtacaacgagaagttccagggcagagtgaccatcagctccgacaagagcatcagcaccgcctacatggaactgagcagcctgagaagcgaggataccgccatgtactattgcgccagaggcacctactactacggcaccagagtgttcgactactggggccagggaaccctggtcacagtctcttctacgcgtacgcgtggaggtggtggctccgaagtgcagctggttcagtctggggccgaagtgaagaagcctggcgagagcctgcggatcagctgtaaaggcagcggctacagcttcagcacctactggatctcttgggtccgacagatgcccggcaaaggactggaatggatgggcaagatctaccccggcgacagctacaccaactacagccctagcttccagggccaagtgaccatcagcgccgacaagagcatcagcacagcctacctccagtggtcctctctgaaggccagcgacaccgccatgtactactgtgccagaggctacggcatcttcgactattggggccagggcaccctggtcacagtttctagcggaggcggaggatctggtggcggaggaagtggcggaggcggttcttcttatgagctgacccagcctccaagcgtgtccgtgtctcctggacagacagccagcatcacctgtagcggcgacaacatcggcgatcagtacgcccactggtatcagcagaagcccggacagtctcccgtgctggtcatctaccaggacaagaacagacccagcggcatccccgagagattcagcggcagcaatagcggcaataccgccacactgacaatcagcggcacccaggctatggacgaggccgattactactgcgccacctacacaggcttcggcagcctggctgtttttggaggcggcaccaaactgaccgtgctgcatcaccaccatcaccac

SEQ ID NO: 2588 - DNA, 1557 bp, Artificial Sequence
  Synthetic Polynucleotide
atggccttaccagtgaccgccttgctcctgccgctggccttgctgctccacgccgccaggccggacatccagatgacacagagccctagcagcctgtctgccagcgtgggagacagagtgaccatcacatgcaaggccagcgaccacatcaacaactggctggcctggtatcagcagaagcctggacaggcccctaagctgctgatctacggcgctaccacactggaaacaggcgtgcccagcagattttctggcagcggctctggcaccgactacaccctgacaatatccagcctccagcctgaggacttcgccacctactactgtcagcagagctggaacaccccttggacattcggccagggcaccaagctggaaatcaagagaggcggaggcggaagtggaggcggaggatctggcggcggaggctctcaagttcagcttcaacagcctggcgctgagctggtcaaacctggcgcttctgtgaagatgagctgcaaagccagcggctacgccttcagcagctactggatcaactggatgaagcagaaacccggccagggactcgaatggatcggccaaatctatcccggcgacggcgacaccaactacaacggcaagttcaagggcagagccacactgaccgccgatacctctagcagcacagcctacatgcagctgagcagcctgaccagcgaagatagcgccgtgtacttctgtgcccggtccatcacaacagtcgtgggctgcgctatggactattggggccagggaacaagcgtgaccgtgtctagtacgcgtacgcgtggaggtggtggctccgaagtgcagctggttcagtctggggccgaagtgaagaagcctggcgagagcctgcggatcagctgtaaaggcagcggctacagcttcagcacctactggatctcttgggtccgacagatgcccggcaaaggactggaatggatgggcaagatctaccccggcgacagctacaccaactacagccctagcttccagggccaagtgaccatcagcgccgacaagagcatcagcacagcctacctccagtggtcctctctgaaggccagcgacaccgccatgtactactgtgccagaggctacggcatcttcgactattggggccagggcaccctggtcacagtttctagcggaggcggaggatctggtggcggaggaagtggcggaggcggttcttcttatgagctgacccagcctccaagcgtgtccgtgtctcctggacagacagccagcatcacctgtagcggcgacaacatcggcgatcagtacgcccactggtatcagcagaagcccggacagtctcccgtgctggtcatctaccaggacaagaacagacccagcggcatccccgagagattcagcggcagcaatagcggcaataccgccacactgacaatcagcggcacccaggctatggacgaggccgattactactgcgccacctacacaggcttcggcagcctggctgtttttggaggcggcaccaaactgaccgtgctgcatcaccaccatcaccac

SEQ ID NO: 2589 - DNA, 1557 bp, Artificial Sequence
  Synthetic Polynucleotide
atggccttaccagtgaccgccttgctcctgccgctggccttgctgctccacgccgccaggccggacatccagatgacccagagccctagctcactgagcgccagcgtgggcgacagggtgaccattacctgctccgccagccaggacatcagcaactacctgaactggtaccagcagaagcccggcaaggcccccaagctgctgatctactacacctccaacctgcactccggcgtgcccagcaggttcagcggaagcggcagcggcaccgatttcaccctgaccatctccagcctgcagcccgaggacttcgccacctactactgccagcagtacaggaagctcccctggactttcggccagggcaccaaactggagatcaagcgtggcggaggcggaagtggaggcggaggatctggcggcggaggctctcaggtgcagctggtccagagcggcgccgaagtgaagaagcccggcagctccgtgaaagtgagctgcaaggccagcggcggcaccttcagcaactactggatgcactgggtgaggcaggcccccggacagggcctggagtggatgggcgccacctacaggggccacagcgacacctactacaaccagaagttcaagggccgggtgaccatcaccgccgacaagagcaccagcaccgcctacatggaactgagcagcctcaggagcgaggacaccgctgtgtattactgcgccaggggcgccatctacgacggctacgacgtgctggacaactggggccagggcacactggtgaccgtgtccagcacgcgtacgcgtggaggtggtggctccgaagtgcagctggttcagtctggggccgaagtgaagaagcctggcgagagcctgcggatcagctgtaaaggcagcggctacagcttcagcacctactggatctcttgggtccgacagatgcccggcaaaggactggaatggatgggcaagatctaccccggcgacagctacaccaactacagccctagcttccagggccaagtgaccatcagcgccgacaagagcatcagcacagcctacctccagtggtcctctctgaaggccagcgacaccgccatgtactactgtgccagaggctacggcatcttcgactattggggccagggcaccctggtcacagtttctagcggaggcggaggatctggtggcggaggaagtggcggaggcggttcttcttatgagctgacccagcctccaagcgtgtccgtgtctcctggacagacagccagcatcacctgtagcggcgacaacatcggcgatcagtacgcccactggtatcagcagaagcccggacagtctcccgtgctggtcatctaccaggacaagaacagacccagcggcatccccgagagattcagcggcagcaatagcggcaataccgccacactgacaatcagcggcacccaggctatggacgaggccgattactactgcgccacctacacaggcttcggcagcctggctgtttttggaggcggcaccaaactgaccgtgctgcatcaccaccatcaccac

SEQ ID NO: 2590 - DNA, 1557 bp, Artificial Sequence
  Synthetic Polynucleotide
atggccttaccagtgaccgccttgctcctgccgctggccttgctgctccacgccgccaggccggacatcgtgctgacacagagccctgccaccctgtctctgagccctggcgatagagccaccatcagctgtagagccagcgagagcgtgaccatcctgggcagccacctgatctactggtatcagcagaagcccggccagccccccagactgctgattcagctggcctccaatgtgcagaccggcgtgccagccagattttccggcagcggcagcagaaccgacttcaccctgaccatcagcagcgtggaacccgaggacttcgccgtgtactactgcctccagagccggaccatccccagaacattcggccagggcaccaagctggaaatcaagagaggcggaggcggaagtggaggcggaggatctggcggcggaggctctcaggtgcagctggtgcagtctggccccgaagtgaagaaacccggcgagtccgtgaagatcagctgcaaggccagcggctacaccttccggcactacagcatgaactgggtcaagcaggccccaggccagggcctgaagtggatgggcagaatcaacaccgagagcggcgtgcccatctacgccgacgacttcaagggccggttcagcttcaccgtggacaccagcgccagcaccgcctacctggaaatctccagcctgaccagcgaggataccgccgtgtatttctgctccaacgactacctgtacagcctggatttctggggccagggaaccaccctgacagtgtcctctacgcgtacgcgtggaggtggtggctccgaagtgcagctggttcagtctggggccgaagtgaagaagcctggcgagagcctgcggatcagctgtaaaggcagcggctacagcttcagcacctactggatctcttgggtccgacagatgcccggcaaaggactggaatggatgggcaagatctaccccggcgacagctacaccaactacagccctagcttccagggccaagtgaccatcagcgccgacaagagcatcagcacagcctacctccagtggtcctctctgaaggccagcgacaccgccatgtactactgtgccagaggctacggcatcttcgactattggggccagggcaccctggtcacagtttctagcggaggcggaggatctggtggcggaggaagtggcggaggcggttcttcttatgagctgacccagcctccaagcgtgtccgtgtctcctggacagacagccagcatcacctgtagcggcgacaacatcggcgatcagtacgcccactggtatcagcagaagcccggacagtctcccgtgctggtcatctaccaggacaagaacagacccagcggcatccccgagagattcagcggcagcaatagcggcaataccgccacactgacaatcagcggcacccaggctatggacgaggccgattactactgcgccacctacacaggcttcggcagcctggctgtttttggaggcggcaccaaactgaccgtgctgcatcaccaccatcaccac

SEQ ID NO: 2591 - DNA, 1554 bp, Artificial Sequence
  Synthetic Polynucleotide
atggccttaccagtgaccgccttgctcctgccgctggccttgctgctccacgccgccaggccggacatcgtgctgacacagagccctgcttctctggccgtgtctctgggagagagagccaccatcaactgtagagccagcgagagcgtgtccgtgattggagcccacctgatccactggtatcagcagaagcctggacagcctcctaagctgctgatctacctggcctccaacctggaaacaggcgtgccagccagattttctggcagcggctctggcaccgatttcaccctgacaatcagcagcctccaggccgaagatgccgccatctactactgcctccagagccggatcttccccagaacctttggacagggcaccaagctggaaatcaaaggcggaggcggaagtggaggcggaggatctggcggcggaggctctcaagttcagctggtgcagtctggctccgagctgaagaaacctggcgagtccgtgaagatcagctgcaaggccagcggctacaccttcaccgactacagcatcaactgggtcaagcaggcccctggacagggactgaaatggatgggctggatcaacaccgagacaagagagcccgcctacgcctacgacttcagaggcagattcgtgttctccctggacaccagcgccagcacagcctatctccagatcagctctctgaaggccgaggataccgccgtgtacttctgcgccctggactacagctacgctatggactattggggccagggcaccctggtcacagtctcttctacgcgtacgcgtggaggtggtggctccgaagtgcagctggttcagtctggggccgaagtgaagaagcctggcgagagcctgcggatcagctgtaaaggcagcggctacagcttcagcacctactggatctcttgggtccgacagatgcccggcaaaggactggaatggatgggcaagatctaccccggcgacagctacaccaactacagccctagcttccagggccaagtgaccatcagcgccgacaagagcatcagcacagcctacctccagtggtcctctctgaaggccagcgacaccgccatgtactactgtgccagaggctacggcatcttcgactattggggccagggcaccctggtcacagtttctagcggaggcggaggatctggtggcggaggaagtggcggaggcggttcttcttatgagctgacccagcctccaagcgtgtccgtgtctcctggacagacagccagcatcacctgtagcggcgacaacatcggcgatcagtacgcccactggtatcagcagaagcccggacagtctcccgtgctggtcatctaccaggacaagaacagacccagcggcatccccgagagattcagcggcagcaatagcggcaataccgccacactgacaatcagcggcacccaggctatggacgaggccgattactactgcgccacctacacaggcttcggcagcctggctgtttttggaggcggcaccaaactgaccgtgctgcatcaccaccatcaccac

SEQ ID NO: 2592 - DNA, 1557 bp, Artificial Sequence
  Synthetic Polynucleotide
atggccttaccagtgaccgccttgctcctgccgctggccttgctgctccacgccgccaggccggacatcgtgctgacacagtctcccgccacactgtcactgagccctggcgatagagccacactgagctgtagagccagcgagagcgtgacaatcctgggcagccacctgatctactggtatcagcagaagcccggacaggcccctagactgctgattcagctcgccagcaatgtgcagacaggcatccctgccagattttccggcagcggcagcagaaccgatttcaccctgaccataagcagcctggaacctgaggacttcgccgtgtactactgcctccagagccggacaatccccagaacctttggacagggcaccaagctggaaatcaagagaggcggaggcggaagtggaggcggaggatctggcggcggaggctctcaagttcaactggtgcagagcggctccgagctgaagaaacctggcgagtccgtgaagattagctgcaaggccagcggctacaccttcacacactacagcatgaactgggtccgacaggctccaggccaaggactggaatggatgggcagaatcaacaccgagacaggcgagcccctgtacgccgacgatttcaagggcagattcgtgttcagcctggacaccagcgccagcacagcctatctccagatcagctctctgaaggccgaggacaccgccgtgtattattgcagcaacgactacctgtactccctggactattggggccagggcacactggtcacagtgtctagtacgcgtacgcgtggaggtggtggctccgaagtgcagctggttcagtctggggccgaagtgaagaagcctggcgagagcctgcggatcagctgtaaaggcagcggctacagcttcagcacctactggatctcttgggtccgacagatgcccggcaaaggactggaatggatgggcaagatctaccccggcgacagctacaccaactacagccctagcttccagggccaagtgaccatcagcgccgacaagagcatcagcacagcctacctccagtggtcctctctgaaggccagcgacaccgccatgtactactgtgccagaggctacggcatcttcgactattggggccagggcaccctggtcacagtttctagcggaggcggaggatctggtggcggaggaagtggcggaggcggttcttcttatgagctgacccagcctccaagcgtgtccgtgtctcctggacagacagccagcatcacctgtagcggcgacaacatcggcgatcagtacgcccactggtatcagcagaagcccggacagtctcccgtgctggtcatctaccaggacaagaacagacccagcggcatccccgagagattcagcggcagcaatagcggcaataccgccacactgacaatcagcggcacccaggctatggacgaggccgattactactgcgccacctacacaggcttcggcagcctggctgtttttggaggcggcaccaaactgaccgtgctgcatcaccaccatcaccac

SEQ ID NO: 2593 - DNA, 1560 bp, Artificial Sequence
  Synthetic Polynucleotide
atggccttaccagtgaccgccttgctcctgccgctggccttgctgctccacgccgccaggccggacgagatcgtgctgacacagagccctgccaccctgtctctgagccctggcgaaagagccaccctgagctgtagagccagccagagcgtgtccagctacctggcctggtatcagcagaagcccggccaggctccccggctgctgatctacgatgccagcaatagagccaccggcatccccgccagattttccggctctggcagcggcaccgacttcaccctgaccatcagctccctggaacccgaggacttcgccgtgtactactgccagcagcggagcaactggcccatcacattcggccagggcacccggctggaaatcaaaggcggaggcggaagtggaggcggaggatctggcggcggaggctctgaagtgcagctggtggaatcaggcggcggactggtgcagcctggcagaagcctgagactgagctgtgccgccagcggcttcaccttcaacgactacgccatgcactgggtgcgccaggcccctggaaaaggactggaatgggtgtccacaatcagctggaacagcggcagcatcggctacgccgatagcgtgaagggccggttcaccatcagccgggacaacgccaagaagtccctgtacctccagatgaacagcctgcgggccgaggacacagccctgtactattgcgccaaggacatccagtacggcaactactactacggcatggacgtgtggggccagggaaccaccgtgaccgtgtcatctacgcgtacgcgtggaggtggtggctccgaagtgcagctggttcagtctggggccgaagtgaagaagcctggcgagagcctgcggatcagctgtaaaggcagcggctacagcttcagcacctactggatctcttgggtccgacagatgcccggcaaaggactggaatggatgggcaagatctaccccggcgacagctacaccaactacagccctagcttccagggccaagtgaccatcagcgccgacaagagcatcagcacagcctacctccagtggtcctctctgaaggccagcgacaccgccatgtactactgtgccagaggctacggcatcttcgactattggggccagggcaccctggtcacagtttctagcggaggcggaggatctggtggcggaggaagtggcggaggcggttcttcttatgagctgacccagcctccaagcgtgtccgtgtctcctggacagacagccagcatcacctgtagcggcgacaacatcggcgatcagtacgcccactggtatcagcagaagcccggacagtctcccgtgctggtcatctaccaggacaagaacagacccagcggcatccccgagagattcagcggcagcaatagcggcaataccgccacactgacaatcagcggcacccaggctatggacgaggccgattactactgcgccacctacacaggcttcggcagcctggctgtttttggaggcggcaccaaactgaccgtgctgcatcaccaccatcaccac

SEQ ID NO: 2594 - DNA, 1566 bp, Artificial Sequence
  Synthetic Polynucleotide
atggccttaccagtgaccgccttgctcctgccgctggccttgctgctccacgccgccaggccggacatcgtgatgacccagacccccctgagcctgcctgtgacacctggcgagcctgccagcatctcctgcagaagcagcaagagcctgctgcacagcaacggcatcacctacctgtactggtatctgcagaaacccggccagagcccccaactgctgatctaccagatgagcaacctggtgtccggcgtgcccgacagattttctggcagcggctccggcaccgacttcaccctgaagatcagccgggtggaagccgaggacgtgggcgtgtactactgcgcccagaacctggaactgccctacacctttggcggcggaacaaaggtggaaatcaagcggggcggaggcggaagtggaggcggaggatctggcggcggaggctctcaggtgcaactggtgcagagcggagccgaagtgaaaaagcccggcagcagcgtgaaggtgtcctgcaaggccagcggctacgccttcagctactcctggatcaactgggtgcgccaggcccctggacagggcctggaatggatgggcagaatcttccccggcgacggcgacaccgactacaacggcaagttcaagggcagagtgaccatcaccgccgacaagagcaccagcaccgcctacatggaactgagcagcctgcggagcgaggataccgccgtgtactattgtgccagaaacgtgttcgacggctactggctggtgtactggggccagggaacacttgtgaccgtgtccagcacgcgtacgcgtggaggtggtggctccgaagtgcagctggttcagtctggggccgaagtgaagaagcctggcgagagcctgcggatcagctgtaaaggcagcggctacagcttcagcacctactggatctcttgggtccgacagatgcccggcaaaggactggaatggatgggcaagatctaccccggcgacagctacaccaactacagccctagcttccagggccaagtgaccatcagcgccgacaagagcatcagcacagcctacctccagtggtcctctctgaaggccagcgacaccgccatgtactactgtgccagaggctacggcatcttcgactattggggccagggcaccctggtcacagtttctagcggaggcggaggatctggtggcggaggaagtggcggaggcggttcttcttatgagctgacccagcctccaagcgtgtccgtgtctcctggacagacagccagcatcacctgtagcggcgacaacatcggcgatcagtacgcccactggtatcagcagaagcccggacagtctcccgtgctggtcatctaccaggacaagaacagacccagcggcatccccgagagattcagcggcagcaatagcggcaataccgccacactgacaatcagcggcacccaggctatggacgaggccgattactactgcgccacctacacaggcttcggcagcctggctgtttttggaggcggcaccaaactgaccgtgctgcatcaccaccatcaccac

SEQ ID NO: 2595 - DNA, 1557 bp, Artificial Sequence
  Synthetic Polynucleotide
atggccttaccagtgaccgccttgctcctgccgctggccttgctgctccacgccgccaggccggacatccagatgacacagagccctagcagcctgtctgccagcgtgggagacagagtgaccatcacctgtagagccagcagcagcgtgtcctacatgcactggtatcagcagaagcccggcaaggcccctaagcctctgatctacgcccctagcaatctggcctctggcgtgccaagcagattttctggcagcggctctggcaccgacttcaccctgacaatatccagcctccagcctgaggacttcgccacctactactgccagcagtggtccttcaatcctcctaccttcggccagggcaccaaggtggaaatcaaaagaggcggaggcggaagtggaggcggaggatctggcggcggaggctctgaagtgcagcttgttgaatctggcggcggactggttcagcctggcggatctctgagactgtcttgtgccgccagcggctacaccttcaccagctacaatatgcactgggtccgacaggcccctggcaaaggacttgaatgggtcggagccatctatcccggcaacggcgacacctcctacaaccagaagttcaagggcagattcaccatcagcgtggacaagagcaagaacaccctgtacctccagatgaactccctgagagccgaggacaccgccgtgtactattgtgccagagtggtgtactacagcaacagctactggtacttcgacgtgtggggccagggaaccctggtcacagtttcttctacgcgtacgcgtggaggtggtggctccgaagtgcagctggttcagtctggggccgaagtgaagaagcctggcgagagcctgcggatcagctgtaaaggcagcggctacagcttcagcacctactggatctcttgggtccgacagatgcccggcaaaggactggaatggatgggcaagatctaccccggcgacagctacaccaactacagccctagcttccagggccaagtgaccatcagcgccgacaagagcatcagcacagcctacctccagtggtcctctctgaaggccagcgacaccgccatgtactactgtgccagaggctacggcatcttcgactattggggccagggcaccctggtcacagtttctagcggaggcggaggatctggtggcggaggaagtggcggaggcggttcttcttatgagctgacccagcctccaagcgtgtccgtgtctcctggacagacagccagcatcacctgtagcggcgacaacatcggcgatcagtacgcccactggtatcagcagaagcccggacagtctcccgtgctggtcatctaccaggacaagaacagacccagcggcatccccgagagattcagcggcagcaatagcggcaataccgccacactgacaatcagcggcacccaggctatggacgaggccgattactactgcgccacctacacaggcttcggcagcctggctgtttttggaggcggcaccaaactgaccgtgctgcatcaccaccatcaccac

SEQ ID NO: 2596 - DNA, 1563 bp, Artificial Sequence
  Synthetic Polynucleotide
atggccttaccagtgaccgccttgctcctgccgctggccttgctgctccacgccgccaggccgcagatcgtgctgtctcagtctcctgccatcctgagcgcttccccaggcgagaaagtgaccatgacctgtagagccagcagcagcgtgtcctacatgcactggtatcagcagaagcccggcagcagccctaagccttggatctacgccaccagcaatctggcctctggcgtgccagccagattttctggctctggcagcggcaccagctacagcttcacaatcagcagagtggaagccgaggacgccgccacctactattgtcagcagtggaccttcaatcctcctaccttcggcggaggcacccggctggaaatcaaaagaacagtggctgctggcggaggcggaagtggaggcggaggatctggcggcggaggctctcaggcttatctgcaacagagcggagccgaactcgtcagacctggcgcttctgtgaagatgagctgcaaggccagcggctacaccttcaccagctataatatgcactgggtcaagcagacccctcggcagggactcgaatggatcggcggaatctatcccggcaacggcgacacctcctacaaccagaagttcaagggcaaagccacactgaccgtgggcaagagcagcagcaccgcctatatgcagctcagcagcctgaccagcgaggacagcgccgtgtacttctgcgccagatacgactacaactacgctatggactactggggccagggcaccagcgtgacagttagctctgccagcacgcgtacgcgtggaggtggtggctccgaagtgcagctggttcagtctggggccgaagtgaagaagcctggcgagagcctgcggatcagctgtaaaggcagcggctacagcttcagcacctactggatctcttgggtccgacagatgcccggcaaaggactggaatggatgggcaagatctaccccggcgacagctacaccaactacagccctagcttccagggccaagtgaccatcagcgccgacaagagcatcagcacagcctacctccagtggtcctctctgaaggccagcgacaccgccatgtactactgtgccagaggctacggcatcttcgactattggggccagggcaccctggtcacagtttctagcggaggcggaggatctggtggcggaggaagtggcggaggcggttcttcttatgagctgacccagcctccaagcgtgtccgtgtctcctggacagacagccagcatcacctgtagcggcgacaacatcggcgatcagtacgcccactggtatcagcagaagcccggacagtctcccgtgctggtcatctaccaggacaagaacagacccagcggcatccccgagagattcagcggcagcaatagcggcaataccgccacactgacaatcagcggcacccaggctatggacgaggccgattactactgcgccacctacacaggcttcggcagcctggctgtttttggaggcggcaccaaactgaccgtgctgcatcaccaccatcaccac

SEQ ID NO: 2597 - DNA, 1557 bp, Artificial Sequence; identical to SEQ ID NO: 2595
  Synthetic Polynucleotide

SEQ ID NO: 2598 - DNA, 1560 bp, Artificial Sequence
  Synthetic Polynucleotide
atggccttaccagtgaccgccttgctcctgccgctggccttgctgctccacgccgccaggccggacgagatcgtgctgacacagagccctgccaccctgtctctgagccctggcgaaagagccaccctgagctgtagagccagccagagcgtgtccagctacctggcctggtatcagcagaagcccggccaggctccccggctgctgatctacgatgccagcaatagagccaccggcatccccgccagattttccggctctggcagcggcaccgacttcaccctgaccatcagctccctggaacccgaggacttcgccgtgtactactgccagcagcggagcaactggcccatcacattcggccagggcacccggctggaaatcaaaggcggaggcggaagtggaggcggaggatctggcggcggaggctctgaggtgcagcttgttgagtctggcggaggactggtgcagcccgatagaagcctgagactgtcttgtgccgccagcggcttcaccttccacgattatgccatgcactgggtccgacaggcccctggcaaaggacttgaatgggtgtccaccatctcttggaacagcggcacaatcggctacgccgactctgtgaagggcagattcaccatcagccgggacaacgccaagaacagcctgtacctccagatgaactccctgagagccgaggacacagccctgtactactgcgccaaggacatccagtacggcaactactactacggcatggacgtgtggggccagggcacaacagtgacagtctcttctacgcgtacgcgtggaggtggtggctccgaagtgcagctggttcagtctggggccgaagtgaagaagcctggcgagagcctgcggatcagctgtaaaggcagcggctacagcttcagcacctactggatctcttgggtccgacagatgcccggcaaaggactggaatggatgggcaagatctaccccggcgacagctacaccaactacagccctagcttccagggccaagtgaccatcagcgccgacaagagcatcagcacagcctacctccagtggtcctctctgaaggccagcgacaccgccatgtactactgtgccagaggctacggcatcttcgactattggggccagggcaccctggtcacagtttctagcggaggcggaggatctggtggcggaggaagtggcggaggcggttcttcttatgagctgacccagcctccaagcgtgtccgtgtctcctggacagacagccagcatcacctgtagcggcgacaacatcggcgatcagtacgcccactggtatcagcagaagcccggacagtctcccgtgctggtcatctaccaggacaagaacagacccagcggcatccccgagagattcagcggcagcaatagcggcaataccgccacactgacaatcagcggcacccaggctatggacgaggccgattactactgcgccacctacacaggcttcggcagcctggctgtttttggaggcggcaccaaactgaccgtgctgcatcaccaccatcaccac

SEQ ID NO: 2599 - DNA, 1569 bp, Artificial Sequence
  Synthetic Polynucleotide
atggccttaccagtgaccgccttgctcctgccgctggccttgctgctccacgccgccaggccggacatccagatgacccagagccccagcagcctgtctgccagcgtgggcgacagagtgaccatcacctgtcggagcagccagagcatcgtgcactccgtgggcaacaccttcctggaatggtatcagcagaagcccggcaaggcccccaagctgctgatctacaaggtgtccaacagattcagcggcgtgcccagcaggtttagcggctctggcagcggcaccgacttcaccctgaccatctctagcctccagcccgaggacttcgccacctactactgttttcaaggcagccagttcccctacaccttcggccagggaacaaaggtggaaatcaagcggggcggaggcggaagtggaggcggaggatctggcggcggaggctctgaagtgcaactggtggaaagcggaggcggcctggtgcagcctggcggatctctgagactgagctgtgccgccagcggctacgagttcagccggtcctggatgaactgggtgcgccaggcccctggcaagggactggaatgggtgggaagaatctaccccggcgacggcgacaccaactacagcggcaagttcaagggccggttcaccatcagcgccgacaccagcaagaacaccgcctacctccagatgaacagcctgcgggccgaggataccgccgtgtactactgtgccagagatggcagctcctgggactggtacttcgacgtgtggggacagggaacccttgtgaccgtgtccagcacgcgtacgcgtggaggtggtggctccgaagtgcagctggttcagtctggggccgaagtgaagaagcctggcgagagcctgcggatcagctgtaaaggcagcggctacagcttcagcacctactggatctcttgggtccgacagatgcccggcaaaggactggaatggatgggcaagatctaccccggcgacagctacaccaactacagccctagcttccagggccaagtgaccatcagcgccgacaagagcatcagcacagcctacctccagtggtcctctctgaaggccagcgacaccgccatgtactactgtgccagaggctacggcatcttcgactattggggccagggcaccctggtcacagtttctagcggaggcggaggatctggtggcggaggaagtggcggaggcggttcttcttatgagctgacccagcctccaagcgtgtccgtgtctcctggacagacagccagcatcacctgtagcggcgacaacatcggcgatcagtacgcccactggtatcagcagaagcccggacagtctcccgtgctggtcatctaccaggacaagaacagacccagcggcatccccgagagattcagcggcagcaatagcggcaataccgccacactgacaatcagcggcacccaggctatggacgaggccgattactactgcgccacctacacaggcttcggcagcctggctgtttttggaggcggcaccaaactgaccgtgctgcatcaccaccatcaccac

SEQ ID NO: 2600 - DNA, 1545 bp, Artificial Sequence
  Synthetic Polynucleotide
atggccttaccagtgaccgccttgctcctgccgctggccttgctgctccacgccgccaggccggacatcgtgatgacccagagccccagcagcctgtctgccagcgtgggcgacagagtgaccatcacatgcaaggccagccagagcgtgaccaacgacgtggcctggtatcagcagaagcccggcaaggcccccaagctgctgatctactacgccagcaacagatacaccggcgtgcccagcagattcagcggctctggcagcggcaccgacttcaccctgaccatctctagcctccagcccgaggacttcgccacctactactgtcagcaggactacagaagcccctggaccttcggcggaggcaccaaggtggaaatcaagcggggcggaggcggaagtggaggcggaggatctggcggcggaggctctcaggtgcaactggaagaaagcgggggaggcgtcgtgcggcctggaagaagtctgagactgagctgtgccgccagcggcttcaccttcagcgactacggcgtgaactggatcagacaggcccctggcaagggcctggaatgggtcacaatcatctggggcgacggcagaaccgactacaacagcgccctgaagtcccggttcaccgtgtcccggaacaacagcaacaacaccctgagcctccagatgaacagcctgaccaccgaggacaccgccgtgtactactgtgtgcgggctcccggcaaccgggctatggaatattggggacagggcgtactcgtgaccgtgtcctctacgcgtacgcgtggaggtggtggctccgaagtgcagctggttcagtctggggccgaagtgaagaagcctggcgagagcctgcggatcagctgtaaaggcagcggctacagcttcagcacctactggatctcttgggtccgacagatgcccggcaaaggactggaatggatgggcaagatctaccccggcgacagctacaccaactacagccctagcttccagggccaagtgaccatcagcgccgacaagagcatcagcacagcctacctccagtggtcctctctgaaggccagcgacaccgccatgtactactgtgccagaggctacggcatcttcgactattggggccagggcaccctggtcacagtttctagcggaggcggaggatctggtggcggaggaagtggcggaggcggttcttcttatgagctgacccagcctccaagcgtgtccgtgtctcctggacagacagccagcatcacctgtagcggcgacaacatcggcgatcagtacgcccactggtatcagcagaagcccggacagtctcccgtgctggtcatctaccaggacaagaacagacccagcggcatccccgagagattcagcggcagcaatagcggcaataccgccacactgacaatcagcggcacccaggctatggacgaggccgattactactgcgccacctacacaggcttcggcagcctggctgtttttggaggcggcaccaaactgaccgtgctgcatcaccaccatcaccac

SEQ ID NO: 2601 - DNA, 1563 bp, Artificial Sequence
  Synthetic Polynucleotide
atggccttaccagtgaccgccttgctcctgccgctggccttgctgctccacgccgccaggccgcaggtgcagctccagcagtctggacccggcctcgtgaagcctagccagacactgagcctgacctgcgccatcagcggcgatagcgtgtccagcaatagcgccgcctggaactggatcagacagtccccctctcggggcctggaatggctgggccggacctactaccgcagcaagtggtacaacgactacgccgtgtccgtgaagtcccggatcaccatcaaccccgacaccagcaagaaccagttctccttgcaactgaacagcgtgacccccgaggacaccgccgtgtactactgcgccagagaagtgaccggcgacctggaagatgccttcgacatctggggccagggaacaatggtcacagtgtccagcggcggaggcggaagtggaggcggaggatctggcggcggaggctctgacatccagatgacccagagccccagcagcctgtctgccagcgtgggcgacagagtgaccatcacctgtagagccagccagaccatctggtcctacctgaactggtatcagcagaggcccggcaaggcccccaacctgctgatctatgccgccagctctctccagagcggcgtgcccagcagattttccggcagaggcagcggcaccgacttcaccctgaccatcagttccttgcaggccgaggacttcgccacctactactgccagcagagctacagcatcccccagattttcggccagggcaccaagctggaaatcaagacgcgtacgcgtggaggtggtggctccgaagtgcagctggttcagtctggggccgaagtgaagaagcctggcgagagcctgcggatcagctgtaaaggcagcggctacagcttcagcacctactggatctcttgggtccgacagatgcccggcaaaggactggaatggatgggcaagatctaccccggcgacagctacaccaactacagccctagcttccagggccaagtgaccatcagcgccgacaagagcatcagcacagcctacctccagtggtcctctctgaaggccagcgacaccgccatgtactactgtgccagaggctacggcatcttcgactattggggccagggcaccctggtcacagtttctagcggaggcggaggatctggtggcggaggaagtggcggaggcggttcttcttatgagctgacccagcctccaagcgtgtccgtgtctcctggacagacagccagcatcacctgtagcggcgacaacatcggcgatcagtacgcccactggtatcagcagaagcccggacagtctcccgtgctggtcatctaccaggacaagaacagacccagcggcatccccgagagattcagcggcagcaatagcggcaataccgccacactgacaatcagcggcacccaggctatggacgaggccgattactactgcgccacctacacaggcttcggcagcctggctgtttttggaggcggcaccaaactgaccgtgctgcatcaccaccatcaccac

SEQ ID NO: 2602 - DNA, 1560 bp, Artificial Sequence
  Synthetic Polynucleotide
atggccttaccagtgaccgccttgctcctgccgctggccttgctgctccacgccgccaggccggaggtgcaactggttgagtctggcggaggactggtgcagcctggaagaagcctgagactgtcttgtgccgccagcggcttcaccttcgacgattatgccatgcactgggtccgacaggcccctggcaaaggacttgaatgggtgtccggcatctcctggaacagcggctctatcggctacgccgattccgtgaagggcagattcaccatcagccgggacaacgccaagaacagcctgtacctccagatgaactccctgagagccgaggacacagccctgtactactgcgccaaagacaaaggcggaggctactacgacttttggagcggcagcgattattggggccagggcacactggtcacagtgtctagcggcggaggcggaagtggaggcggaggatctggcggcggaggctcttcttctgagctgacacaggaccctgccgtgtctgttgctctgggccagacagtgcggattacctgtcagggcgatagcctgagaagctactacgcctcctggtatcagcagaagccaggccaggctcctgtgctggtcatctacggcaagaacaacagacccagcggcatccccgatagattcagcggaagcagctctggcaataccgccagcctgacaattactggcgctcaggccgaggacgaggccgactactactgcaacagcagagatagcagcggctgggttttcggcggaggcacaaaactgacagtgctgacgcgtacgcgtggaggtggtggctccgaagtgcagctggttcagtctggggccgaagtgaagaagcctggcgagagcctgcggatcagctgtaaaggcagcggctacagcttcagcacctactggatctcttgggtccgacagatgcccggcaaaggactggaatggatgggcaagatctaccccggcgacagctacaccaactacagccctagcttccagggccaagtgaccatcagcgccgacaagagcatcagcacagcctacctccagtggtcctctctgaaggccagcgacaccgccatgtactactgtgccagaggctacggcatcttcgactattggggccagggcaccctggtcacagtttctagcggaggcggaggatctggtggcggaggaagtggcggaggcggttcttcttatgagctgacccagcctccaagcgtgtccgtgtctcctggacagacagccagcatcacctgtagcggcgacaacatcggcgatcagtacgcccactggtatcagcagaagcccggacagtctcccgtgctggtcatctaccaggacaagaacagacccagcggcatccccgagagattcagcggcagcaatagcggcaataccgccacactgacaatcagcggcacccaggctatggacgaggccgattactactgcgccacctacacaggcttcggcagcctggctgtttttggaggcggcaccaaactgaccgtgctgcatcaccaccatcaccac

SEQ ID NO: 2603 - DNA, 1587 bp, Artificial Sequence
  Synthetic Polynucleotide
atggccttaccagtgaccgccttgctcctgccgctggccttgctgctccacgccgccaggccggaagtgcagctccagcagtctggacctggcctggttaagcctagccagacactgagcctgacctgtgccatcagcggcgatagcgtgctgagcaacagcgacacctggaactggatcagacagagccctagcagaggactggaatggctgggcagaacctaccacagaagcacttggtacgacgactacgccagctctgtgcggggcagagtgtccatcaatgtggacaccagcaagaaccagtacagcctgcaactgaacgccgtgacacctgaggataccggcgtgtactactgcgccagagacagactccaggacggcaactcttggagcgacgcctttgatgtgtggggccagggcacaatggtcaccgtttctagcggcggaggcggaagtggaggcggaggatctggcggcggaggctctcaatctgctctgacacagcctgccagcgtgtcaggatctcctggacagagcatcaccatctcttgcaccggcaccagctctgatgtcggcggctacaattacgtgtcctggtatcagcagcaccccggcaaggcccctaagctgatgatctacgacgtgtccaacagacccagcggcgtgtccaatagattctccggcagcaagagcggcaacaccgccagcctgacaatttctggactgcaagccgaggacgaggccgactactactgtagcagctacaccagcagcagcacactggtgtacgtgttcggcacaggcaccaaagtgaccgtgcttacgcgtacgcgtggaggtggtggctccgaagtgcagctggttcagtctggggccgaagtgaagaagcctggcgagagcctgcggatcagctgtaaaggcagcggctacagcttcagcacctactggatctcttgggtccgacagatgcccggcaaaggactggaatggatgggcaagatctaccccggcgacagctacaccaactacagccctagcttccagggccaagtgaccatcagcgccgacaagagcatcagcacagcctacctccagtggtcctctctgaaggccagcgacaccgccatgtactactgtgccagaggctacggcatcttcgactattggggccagggcaccctggtcacagtttctagcggaggcggaggatctggtggcggaggaagtggcggaggcggttcttcttatgagctgacccagcctccaagcgtgtccgtgtctcctggacagacagccagcatcacctgtagcggcgacaacatcggcgatcagtacgcccactggtatcagcagaagcccggacagtctcccgtgctggtcatctaccaggacaagaacagacccagcggcatccccgagagattcagcggcagcaatagcggcaataccgccacactgacaatcagcggcacccaggctatggacgaggccgattactactgcgccacctacacaggcttcggcagcctggctgtttttggaggcggcaccaaactgaccgtgctgcatcaccaccatcaccac

SEQ ID NO: 2604 - DNA, 1563 bp, Artificial Sequence
  Synthetic Polynucleotide
atggccttaccagtgaccgccttgctcctgccgctggccttgctgctccacgccgccaggccggacgacatccagatgacccagaccacaagcagcctgtctgccagcctgggcgacagagtgaccatctcttgtagagccagccaggacatcagcaactacctgaactggtatcagcagaaacccgacggcaccgtgaagctgctgatctactacaccagcatcctgcacagcggcgtgcccagcagattttctggctctggcagcggcaccgactacagcctgaccatcagcaatctggaacaagaggacttcgctacctacttctgccagcaaggcaacaccctgccttggacatttggcggaggcaccaagctggaaatcaaagctggcggaggcggaagtggaggcggaggatctggcggcggaggctctgaagtgcaactggttgaatctggcggcggactggttaagcctggcggatctctgaagctgagctgtgccgcctctggcttcgccttcagcatctacgatatgagctgggtccgacagacccctgagaagagactggaatgggtcgcctacatctctagcggcggagggacctactatcccgacacagtgaagggcagattcaccatctccagagacaacgccaagaacaccctgtacctccagatgagcagcctgaagtccgaggacaccgccatgtactactgcgccagacacagcggctatggcacacattggggagtgctgtttgcctactggggccagggaacactggtcacagtttctgctacgcgtacgcgtggaggtggtggctccgaagtgcagctggttcagtctggggccgaagtgaagaagcctggcgagagcctgcggatcagctgtaaaggcagcggctacagcttcagcacctactggatctcttgggtccgacagatgcccggcaaaggactggaatggatgggcaagatctaccccggcgacagctacaccaactacagccctagcttccagggccaagtgaccatcagcgccgacaagagcatcagcacagcctacctccagtggtcctctctgaaggccagcgacaccgccatgtactactgtgccagaggctacggcatcttcgactattggggccagggcaccctggtcacagtttctagcggaggcggaggatctggtggcggaggaagtggcggaggcggttcttcttatgagctgacccagcctccaagcgtgtccgtgtctcctggacagacagccagcatcacctgtagcggcgacaacatcggcgatcagtacgcccactggtatcagcagaagcccggacagtctcccgtgctggtcatctaccaggacaagaacagacccagcggcatccccgagagattcagcggcagcaatagcggcaataccgccacactgacaatcagcggcacccaggctatggacgaggccgattactactgcgccacctacacaggcttcggcagcctggctgtttttggaggcggcaccaaactgaccgtgctgcatcaccaccatcaccac

SEQ ID NO: 2605 - DNA, 1542 bp, Artificial Sequence
  Synthetic Polynucleotide
atggccttaccagtgaccgccttgctcctgccgctggccttgctgctccacgccgccaggccggacatccagatgacccagagccccgccaccatcgagaacacaagcctgtctgccagcgtgggcgacagagtgaccatcacctgtagagccagccagggcatcagctcttggctgacctggtatcagcagaagcccgagaaggcccccaagagcctgatctacgccgccagctctctgcagtctggcgtgcccagcagattttccggcagcggctctggcaccgacttcaccctgacaatcagcagcctgcagcccgaggacttcgccacctactactgccagcagtacgacagctaccccatcaccttcggccagggcacccggctggaaatcaagggcggaggcggaagtggaggcggaggatctggcggcggaggctctcaggtgcaactgcagcagtggggagccggactgctgaagcctagcgagacactgagcctgacctgcgccgtgtacggcggcagcttcagcgcctactattggagctggatcagacagccccctggcaagggcctggaatggatcggcgacatcaatcacggcggaggcaccaactacaaccccagcctgaagtcccgcgtgaccatctccgtggacaccagcaagaaccagttctccctgaagctgaacagcgtgacagccgccgacacagccgtgtactactgtgccagcctgaccgcctattggggccagggatctcttgtgaccgtgtccagcacgcgtacgcgtggaggtggtggctccgaagtgcagctggttcagtctggggccgaagtgaagaagcctggcgagagcctgcggatcagctgtaaaggcagcggctacagcttcagcacctactggatctcttgggtccgacagatgcccggcaaaggactggaatggatgggcaagatctaccccggcgacagctacaccaactacagccctagcttccagggccaagtgaccatcagcgccgacaagagcatcagcacagcctacctccagtggtcctctctgaaggccagcgacaccgccatgtactactgtgccagaggctacggcatcttcgactattggggccagggcaccctggtcacagtttctagcggaggcggaggatctggtggcggaggaagtggcggaggcggttcttcttatgagctgacccagcctccaagcgtgtccgtgtctcctggacagacagccagcatcacctgtagcggcgacaacatcggcgatcagtacgcccactggtatcagcagaagcccggacagtctcccgtgctggtcatctaccaggacaagaacagacccagcggcatccccgagagattcagcggcagcaatagcggcaataccgccacactgacaatcagcggcacccaggctatggacgaggccgattactactgcgccacctacacaggcttcggcagcctggctgtttttggaggcggcaccaaactgaccgtgctgcatcaccaccatcaccac

SEQ ID NO: 2606 - DNA, 1557 bp, Artificial Sequence
  Synthetic Polynucleotide
atggccttaccagtgaccgccttgctcctgccgctggccttgctgctccacgccgccaggccggacgagatcgtgctgacccagagccctgatagcctggccgtgtctctgggcgagagagccaccatcaactgcaaggccagccagagcgtggacttcgacggcgacagctacctgaactggtatcagcagaagcccggccagccccccaaggtgctgatctatgccgccagcacactgcagagcggcgtgcccagcagattttctggcagcggctccggcaccgacttcaccctgaccatcaacagcctggaagccgaggacgccgccacctactactgccagcagagcaacgaggacccctggacctttggcggcggaacaaaggtggaaatcaagggcggaggcggaagtggaggcggaggatctggcggcggaggctctcaggtgcaactggtgcagtccggcgctgaagtgaagaaacctggggccagcgtgaaggtgtcctgcaaggtgtccggctacacctttaccgactactacattacctgggtgcgccaggcccctggacaggccctggaatggatgggctggatctaccccggcagcggcaacaccaagtacagccagaagttccagggcagattcgtgttcagcgtggacaccagcgccagcaccgcctacctgcaactgtctagcctgaaggccgaagataccgccgtgtactactgcgccaactacggcaactattggttcgcctattggggccagggaacccttgtgaccgtgtcctctacgcgtacgcgtggaggtggtggctccgaagtgcagctggttcagtctggggccgaagtgaagaagcctggcgagagcctgcggatcagctgtaaaggcagcggctacagcttcagcacctactggatctcttgggtccgacagatgcccggcaaaggactggaatggatgggcaagatctaccccggcgacagctacaccaactacagccctagcttccagggccaagtgaccatcagcgccgacaagagcatcagcacagcctacctccagtggtcctctctgaaggccagcgacaccgccatgtactactgtgccagaggctacggcatcttcgactattggggccagggcaccctggtcacagtttctagcggaggcggaggatctggtggcggaggaagtggcggaggcggttcttcttatgagctgacccagcctccaagcgtgtccgtgtctcctggacagacagccagcatcacctgtagcggcgacaacatcggcgatcagtacgcccactggtatcagcagaagcccggacagtctcccgtgctggtcatctaccaggacaagaacagacccagcggcatccccgagagattcagcggcagcaatagcggcaataccgccacactgacaatcagcggcacccaggctatggacgaggccgattactactgcgccacctacacaggcttcggcagcctggctgtttttggaggcggcaccaaactgaccgtgctgcatcaccaccatcaccac

SEQ ID NO: 2607 - DNA, 1548 bp, Artificial Sequence
  Synthetic Polynucleotide
atggccttaccagtgaccgccttgctcctgccgctggccttgctgctccacgccgccaggccggacatccagatgacccagagccccagcagcctgtctgccagcgtgggcgacagagtgaccatcacctgtagagccagccagggcatcagctcttggctggcctggtatcagcagaagcccgagaaggcccccaagagcctgatctacgccgcctctagtctccagagcggcgtgcccagcagattttctggcagcggctccggcaccgacttcaccctgacaatcagctccctccagcccgaggacttcgccacctactactgccagcagtacaacagctaccctcccacctttggcggaggcaccaaggtggaaatcaagggcggaggcggaagtggaggcggaggatctggcggcggaggctctgaagtgcaactggtgcagtctggcggagggctggtgcatcctgggggaagcctgagactgagctgtgccggctctggcttcgccttcagcagcagcaccatgcactggatcagacaggcccctggcaagggcctggaatggatcagcctgatcggaagcggagggggcatctactacggcgacagcgtgaagggccggttcaccatcagccgggacaacgccaagaacagcctgtacctccagatgaactccctgcgggccgaggacatggccgtgtactattgtgtgcggggctacttcgactgggtggactacttcgattactggggccagggcaccctcgtgaccgtgtcatctacgcgtacgcgtggaggtggtggctccgaagtgcagctggttcagtctggggccgaagtgaagaagcctggcgagagcctgcggatcagctgtaaaggcagcggctacagcttcagcacctactggatctcttgggtccgacagatgcccggcaaaggactggaatggatgggcaagatctaccccggcgacagctacaccaactacagccctagcttccagggccaagtgaccatcagcgccgacaagagcatcagcacagcctacctccagtggtcctctctgaaggccagcgacaccgccatgtactactgtgccagaggctacggcatcttcgactattggggccagggcaccctggtcacagtttctagcggaggcggaggatctggtggcggaggaagtggcggaggcggttcttcttatgagctgacccagcctccaagcgtgtccgtgtctcctggacagacagccagcatcacctgtagcggcgacaacatcggcgatcagtacgcccactggtatcagcagaagcccggacagtctcccgtgctggtcatctaccaggacaagaacagacccagcggcatccccgagagattcagcggcagcaatagcggcaataccgccacactgacaatcagcggcacccaggctatggacgaggccgattactactgcgccacctacacaggcttcggcagcctggctgtttttggaggcggcaccaaactgaccgtgctgcatcaccaccatcaccac

SEQ ID NO: 2608 - DNA, 1578 bp, Artificial Sequence
  Synthetic Polynucleotide
atggccttaccagtgaccgccttgctcctgccgctggccttgctgctccacgccgccaggccggacgacatcgtgatgacacagtcaccagatagcctcaccgtctccctgggggagcggaccaccattaattgtaaatccagccaaagcgtgctggactcaagcaagaacaagaatagcctcgcctggtatcagcagaagcccggtcagcctccaaagctgctgctttcttgggcctccaccagagagtccgggattcctgataggtttagtggttcaggctccggcacagattttactctgaccattgattctctccagccagaggattctgcaacttattactgccagcaaagcgcccactttcctataacttttggccagggaacccgacttgaaatcaagggcggaggcggaagtggaggcggaggatctggcggcggaggctctcaggtgcagctggtgcagagcggtgccgaagtgaagaaaccaggtgcatccgttaaagtttcatgtaaggctagtggatataccttcaccaattacggaatgaactgggtgaaacaggcccctggccagggactgaagtggatggggtggattaacacctacaccggggagccgacttatgcagacgactttaaggggcgggtcacgatgacctccgacacctccaccagtaccgcctacctggagctgcacaaccttaggtcagacgataccgccgtgtattactgtgcccgatggtcttggtccgacggatactatgtctacttcgactattggggccaggggaccacagttaccgtgtcctctacgcgtacgcgtggaggtggtggctccgaagtgcagctggttcagtctggggccgaagtgaagaagcctggcgagagcctgcggatcagctgtaaaggcagcggctacagcttcagcacctactggatctcttgggtccgacagatgcccggcaaaggactggaatggatgggcaagatctaccccggcgacagctacaccaactacagccctagcttccagggccaagtgaccatcagcgccgacaagagcatcagcacagcctacctccagtggtcctctctgaaggccagcgacaccgccatgtactactgtgccagaggctacggcatcttcgactattggggccagggcaccctggtcacagtttctagcggaggcggaggatctggtggcggaggaagtggcggaggcggttcttcttatgagctgacccagcctccaagcgtgtccgtgtctcctggacagacagccagcatcacctgtagcggcgacaacatcggcgatcagtacgcccactggtatcagcagaagcccggacagtctcccgtgctggtcatctaccaggacaagaacagacccagcggcatccccgagagattcagcggcagcaatagcggcaataccgccacactgacaatcagcggcacccaggctatggacgaggccgattactactgcgccacctacacaggcttcggcagcctggctgtttttggaggcggcaccaaactgaccgtgctgcatcaccaccatcaccac

SEQ ID NO: 2609 - DNA, 1566 bp, Artificial Sequence
  Synthetic Polynucleotide
atggccttaccagtgaccgccttgctcctgccgctggccttgctgctccacgccgccaggccggacgagatcgtgctgacacagagccctggaagcctggccgtgtctcctggcgagcgcgtgacaatgagctgcaagagcagccagagcgtgttcttcagcagctcccagaagaactacctggcctggtatcagcagatccccggccagagccccagactgctgatctactgggccagcaccagagaaagcggcgtgcccgatagattcaccggcagcggctctggcaccgacttcaccctgacaatcagcagcgtgcagcccgaggacctggctatctactactgccaccagtacctgagcagccggaccttcggccagggcaccaagctggaaatcaagagaggcggaggcggaagtggaggcggaggatctggcggcggaggctctcaggtgcaactgcagcagcctggcgctgaggtcgtgaagccaggcgcttccgtgaagatgtcctgcaaggccagcggctacaccttcaccagctactacatccactggatcaagcagacccctggacagggcctggaatgggtgggagtgatctaccccggcaacgacgacatcagctacaaccagaagttccagggcaaggccaccctgaccgccgacaagtctagcaccaccgcctacatgcaactgtccagcctgaccagcgaggacagcgccgtgtactactgcgccagagaagtgcggctgcggtacttcgatgtgtggggccagggaaccaccgtgaccgtgtcatctacgcgtacgcgtggaggtggtggctccgaagtgcagctggttcagtctggggccgaagtgaagaagcctggcgagagcctgcggatcagctgtaaaggcagcggctacagcttcagcacctactggatctcttgggtccgacagatgcccggcaaaggactggaatggatgggcaagatctaccccggcgacagctacaccaactacagccctagcttccagggccaagtgaccatcagcgccgacaagagcatcagcacagcctacctccagtggtcctctctgaaggccagcgacaccgccatgtactactgtgccagaggctacggcatcttcgactattggggccagggcaccctggtcacagtttctagcggaggcggaggatctggtggcggaggaagtggcggaggcggttcttcttatgagctgacccagcctccaagcgtgtccgtgtctcctggacagacagccagcatcacctgtagcggcgacaacatcggcgatcagtacgcccactggtatcagcagaagcccggacagtctcccgtgctggtcatctaccaggacaagaacagacccagcggcatccccgagagattcagcggcagcaatagcggcaataccgccacactgacaatcagcggcacccaggctatggacgaggccgattactactgcgccacctacacaggcttcggcagcctggctgtttttggaggcggcaccaaactgaccgtgctgcatcaccaccatcaccac

SEQ ID NO: 2610 - DNA, 1641 bp, Artificial Sequence
  Synthetic Polynucleotide
atggccttaccagtgaccgccttgctcctgccgctggccttgctgctccacgccgccaggccgtacatcaacatctacaacgccgagcctgccaatcctagcgagaagaacagccccacacagtacgcctacggcagcggagaattcgacatcgtgatgacacagagccctagcagcctgtctgcctctctcggcggcaaagtgaccatcacatgcaaggccagccaggacatcaacaagtatatcgcctggtatcagcacaagcccggcaagggacctagactgctgatccactacaccagcacactccagcctggcatccccagcagattttctggcagcggctccggcagagactacagcttcagcatcagcaacctggaacctgaggacattgccacctactactgcctccagtacgacaacctgctgacctttggagccggcaccaagctggaactgaaaagaggcggaggcggaagtggaggcggaggatctggcggcggaggctctgaagtgaaactccagcagagcggccctgagctggttaagcctggcaccagcgtgaaggtgtcctgtaaagccagcggctactccttcaccgactacaacatgtactgggtcaagcagagccacggcaagagcctggaatggatcggctacatcgacccctacaaaggcggcaccatctacaaccagaagttcaagggcaaagccacactgaccgtggacaagagcagcagcaccgccttcatgcacctgaacagcctgaccagcgaggacagcgccgtgtactattgcgccagagagatgattaccgcctactacttcgactactggggccagggaagcagcgtgaccgttagctctctggaaagaacgcgtacgcgtggaggtggtggctccgaagtgcagctggttcagtctggggccgaagtgaagaagcctggcgagagcctgcggatcagctgtaaaggcagcggctacagcttcagcacctactggatctcttgggtccgacagatgcccggcaaaggactggaatggatgggcaagatctaccccggcgacagctacaccaactacagccctagcttccagggccaagtgaccatcagcgccgacaagagcatcagcacagcctacctccagtggtcctctctgaaggccagcgacaccgccatgtactactgtgccagaggctacggcatcttcgactattggggccagggcaccctggtcacagtttctagcggaggcggaggatctggtggcggaggaagtggcggaggcggttcttcttatgagctgacccagcctccaagcgtgtccgtgtctcctggacagacagccagcatcacctgtagcggcgacaacatcggcgatcagtacgcccactggtatcagcagaagcccggacagtctcccgtgctggtcatctaccaggacaagaacagacccagcggcatccccgagagattcagcggcagcaatagcggcaataccgccacactgacaatcagcggcacccaggctatggacgaggccgattactactgcgccacctacacaggcttcggcagcctggctgtttttggaggcggcaccaaactgaccgtgctgcatcaccaccatcaccac

SEQ ID NO: 2611 - DNA, 1689 bp, Artificial Sequence
  Synthetic Polynucleotide
atggccttaccagtgaccgccttgctcctgccgctggccttgctgctccacgccgccaggccggacatccagatgacacagagccctagcagcctgtctgccagcgtgggagatagagtgaccatcaactgcaaggccagccaggacatcaacagctacctgagctggttccagcagaagcctggcaaggcccctaagacactgatctaccgggccaacagactggtggatggcgtgccaagcagattttctggcagcggcagcggccaggattacaccctgacaatatccagcctccagcctgaggacttcgccacctactactgcctccagtacgacgagttccctctgacctttggcggaggcaccaaggtggaaatcaaaggcggaggcggaagtggaggcggaggatctggcggcggaggctctcaggtgcaactggtgcagtctggggccgaagtgaagaaacctggggcctctgtgaaggtgtcctgcaaagccagcggctacacctttaccaactacgacatcaactgggtccgacaggctccaggccaaggactggaatggatcggctggatctatcctggcgacggcagcaccaagtacaacgagaagttcaaggccaaggccacactgaccgccgataccagcacaagcaccgcctacatggaactgcggagcctgagaagcgacgacaccgccgtgtactattgtgcctccggctacgaggacgctatggactattggggccagggcaccaccgtgacagtgtctagtgccaagcctaccaccacaccagctccaagacctccaactcctgctcctacaatcgccagccagcctctgtctctcagacccgaagcctgtagacctgctgctggcggagctgtgcataccagaggactggatttcgcctgcgacatcacgcgtacgcgtggaggtggtggctccgaagtgcagctggttcagtctggggccgaagtgaagaagcctggcgagagcctgcggatcagctgtaaaggcagcggctacagcttcagcacctactggatctcttgggtccgacagatgcccggcaaaggactggaatggatgggcaagatctaccccggcgacagctacaccaactacagccctagcttccagggccaagtgaccatcagcgccgacaagagcatcagcacagcctacctccagtggtcctctctgaaggccagcgacaccgccatgtactactgtgccagaggctacggcatcttcgactattggggccagggcaccctggtcacagtttctagcggaggcggaggatctggtggcggaggaagtggcggaggcggttcttcttatgagctgacccagcctccaagcgtgtccgtgtctcctggacagacagccagcatcacctgtagcggcgacaacatcggcgatcagtacgcccactggtatcagcagaagcccggacagtctcccgtgctggtcatctaccaggacaagaacagacccagcggcatccccgagagattcagcggcagcaatagcggcaataccgccacactgacaatcagcggcacccaggctatggacgaggccgattactactgcgccacctacacaggcttcggcagcctggctgtttttggaggcggcaccaaactgaccgtgctgcatcaccaccatcaccac

SEQ ID NO: 2612 - DNA, 1557 bp, Artificial Sequence
  Synthetic Polynucleotide
atggccttaccagtgaccgccttgctcctgccgctggccttgctgctccacgccgccaggccggagatcgtgctgacacagagccctctgagcctgcctgttacacctggcgagcctgccagcatctcctgtagaagctctcagagcctgctgcacagcaacggctacaactacctggactggtatctccagaagcctggacagagcccacagctcctgatctacctgggcgtgaactctgtgtccggcgtgcccgatagattttctggcagcggctctggcaccgacttcaccctgaagatcagcagagtggaagccgaggacgtgggcgtgtactactgtatgcaggccctccagacaccttggacattcggccagggcaccaaggtggaaatcaaaggcggcggaggatctggcggaggtggaagtggcggaggcggatctcaagtgcaactggttcagagcggagccgaagtgaagaaacctggcagcagcgtgaaggtgtcctgcaaagcctctggcggcatcttcagcaaccacgccatctcttgggtccgacaggctcctggacaaggactggaatggatgggcggcatcatccccatcttcggcacagccaattacgcccagaaattccagggcagagtgaccatcaccgccgacgagtctaccagcaccgccttcatggaactgagcagcctgagaagcgaggacaccgccgtgtactattgcgccagagaatgggccgacgtgttcgacatttggggccagggaacaatggtcaccgtgtcctctacgcgtacgcgtggaggtggtggctccgaagtgcagctggttcagtctggggccgaagtgaagaagcctggcgagagcctgcggatcagctgtaaaggcagcggctacagcttcagcacctactggatctcttgggtccgacagatgcccggcaaaggactggaatggatgggcaagatctaccccggcgacagctacaccaactacagccctagcttccagggccaagtgaccatcagcgccgacaagagcatcagcacagcctacctccagtggtcctctctgaaggccagcgacaccgccatgtactactgtgccagaggctacggcatcttcgactattggggccagggcaccctggtcacagtttctagcggaggcggaggatctggtggcggaggaagtggcggaggcggttcttcttatgagctgacccagcctccaagcgtgtccgtgtctcctggacagacagccagcatcacctgtagcggcgacaacatcggcgatcagtacgcccactggtatcagcagaagcccggacagtctcccgtgctggtcatctaccaggacaagaacagacccagcggcatccccgagagattcagcggcagcaatagcggcaataccgccacactgacaatcagcggcacccaggctatggacgaggccgattactactgcgccacctacacaggcttcggcagcctggctgtttttggaggcggcaccaaactgaccgtgctgcatcaccaccatcaccac

SEQ ID NO: 2613 - DNA, 1554 bp, Artificial Sequence
  Synthetic Polynucleotide
atggccttaccagtgaccgccttgctcctgccgctggccttgctgctccacgccgccaggccggacatccagatgacacagtctccagccagcctgaccgtgtcactgggacagagagccaccatctcttgcagagccagcgagagcgtggacagctacggcaatagctacctgcactggtatcagcagaagcccggccagcctcctcagctcctgatctacctggcctccaatctggaaagcggcgtgccagccagattttctggcagcggcagcagaaccgacttcaccctgaccattgatcccgtggaagccgatgatgccgccacctactactgccagcagaacaacgaggacccctggacatttggcggaggcaccaaggtggaaatcaaaggcggcggaggatctggcggaggtggaagtggcggaggcggatctgaagttcagctccagcagagcggagccgagcttgtgaaacctggcgcttccgtgaagatgagctgcaaagccttcggctacaccttcaccacctttccaatcgagtggatgaagcagagccacggcaagagcctggaatggatcggcaactttcacccctacaacgaccagaccaagtacaacgaagagttcaagggcagagccaagctgaccatcgacagatccagcagcaccgtgtacctggaactgggcagactgacctccgatgacagcgccgtgtactactgtgccagaggctactactacgccttcgacttttggggccagggcaccacactgacagtgtctagcacgcgtacgcgtggaggtggtggctccgaagtgcagctggttcagtctggggccgaagtgaagaagcctggcgagagcctgcggatcagctgtaaaggcagcggctacagcttcagcacctactggatctcttgggtccgacagatgcccggcaaaggactggaatggatgggcaagatctaccccggcgacagctacaccaactacagccctagcttccagggccaagtgaccatcagcgccgacaagagcatcagcacagcctacctccagtggtcctctctgaaggccagcgacaccgccatgtactactgtgccagaggctacggcatcttcgactattggggccagggcaccctggtcacagtttctagcggaggcggaggatctggtggcggaggaagtggcggaggcggttcttcttatgagctgacccagcctccaagcgtgtccgtgtctcctggacagacagccagcatcacctgtagcggcgacaacatcggcgatcagtacgcccactggtatcagcagaagcccggacagtctcccgtgctggtcatctaccaggacaagaacagacccagcggcatccccgagagattcagcggcagcaatagcggcaataccgccacactgacaatcagcggcacccaggctatggacgaggccgattactactgcgccacctacacaggcttcggcagcctggctgtttttggaggcggcaccaaactgaccgtgctgcatcaccaccatcaccac

SEQ ID NO: 2614 - DNA, 1572 bp, Artificial Sequence
  Synthetic Polynucleotide
atggccttaccagtgaccgccttgctcctgccgctggccttgctgctccacgccgccaggccggacatcgtgatgacccagagccccgatagcctggccgtgtctctgggagagagagccaccatcaactgcgagagcagccagagcctgctgaacagcggcaaccagaagaactacctgacctggtatcagcagaagcccggccagccccccaagcccctgatctattgggccagcaccagagaaagcggcgtgcccgatagattcagcggcagcggaagcggcaccgacttcaccctgaccatcagttctcttcaggccgaggacgtggccgtgtactactgccagaacgactacagctacccctacaccttcggccagggcaccaagctggaaatcaagagaggcggaggcggaagtggaggcggaggatctggcggcggaggctctgaagtgcagctggtgcagtctggggccgaagtgaagaagcctggcgagagcctgaagatcagctgcaagggcagcggctacagcttcaccgactactacatgaagtgggccagacagatgcccggcaagggcctggaatggatgggcgacatcatccccagcaacggggccaccttctacaaccagaaattcaagggccaagtgaccatctccgccgacaagagcatcagcaccacctacctccagtggtccagcctgaaggccagcgacaccgccatgtactattgcgccagaagccatctgctgcgggccagttggttcgcctattggggccagggaacaatggtcacagtgtccagcacgcgtacgcgtggaggtggtggctccgaagtgcagctggttcagtctggggccgaagtgaagaagcctggcgagagcctgcggatcagctgtaaaggcagcggctacagcttcagcacctactggatctcttgggtccgacagatgcccggcaaaggactggaatggatgggcaagatctaccccggcgacagctacaccaactacagccctagcttccagggccaagtgaccatcagcgccgacaagagcatcagcacagcctacctccagtggtcctctctgaaggccagcgacaccgccatgtactactgtgccagaggctacggcatcttcgactattggggccagggcaccctggtcacagtttctagcggaggcggaggatctggtggcggaggaagtggcggaggcggttcttcttatgagctgacccagcctccaagcgtgtccgtgtctcctggacagacagccagcatcacctgtagcggcgacaacatcggcgatcagtacgcccactggtatcagcagaagcccggacagtctcccgtgctggtcatctaccaggacaagaacagacccagcggcatccccgagagattcagcggcagcaatagcggcaataccgccacactgacaatcagcggcacccaggctatggacgaggccgattactactgcgccacctacacaggcttcggcagcctggctgtttttggaggcggcaccaaactgaccgtgctgcatcaccaccatcaccac

SEQ ID NO: 2615 - DNA, 1557 bp, Artificial Sequence
  Synthetic Polynucleotide
atggccttaccagtgaccgccttgctcctgccgctggccttgctgctccacgccgccaggccggacatcgtgctgacacagagccctgcttctctggccgtgtctctgggacagagagccaccatcagctgtagagccagcgagagcgtggacaactacggcaacaccttcatgcactggtatcagcagaagcccggccagcctcctaagctgctgatctacagagccagcaacctggaaagcggcatccccgccagattttctggcagcggcagcagaaccgacttcaccctgaccatcaatcccgtggaagccgacgacgtggcaacctactactgccagcagagcaacgaggaccctcctacatttggagccggcaccaagctggaactgaaaggcggaggcggaagtggaggcggaggatctggcggcggaggctctcagattcagctggtgcagtctggccccgagctgaagaaacctggcgagacagtgaagatcagctgcaaggccagcggctacatcttcaccaattacggcatgaactgggtcaagcaggcccctggcaagagcttcaagtggatgggctggatcaacacctacaccggcgagagcacatacagcgccgacttcaagggcagattcgccttcagcctggaaaccagcgccagcacagcctacctgcacatcaacgacctgaagaacgaggacaccgccacctacttttgcgccagaagcggcggctacgaccctatggattattggggccagggcaccagcgtgaccgtttcttctacgcgtacgcgtggaggtggtggctccgaagtgcagctggttcagtctggggccgaagtgaagaagcctggcgagagcctgcggatcagctgtaaaggcagcggctacagcttcagcacctactggatctcttgggtccgacagatgcccggcaaaggactggaatggatgggcaagatctaccccggcgacagctacaccaactacagccctagcttccagggccaagtgaccatcagcgccgacaagagcatcagcacagcctacctccagtggtcctctctgaaggccagcgacaccgccatgtactactgtgccagaggctacggcatcttcgactattggggccagggcaccctggtcacagtttctagcggaggcggaggatctggtggcggaggaagtggcggaggcggttcttcttatgagctgacccagcctccaagcgtgtccgtgtctcctggacagacagccagcatcacctgtagcggcgacaacatcggcgatcagtacgcccactggtatcagcagaagcccggacagtctcccgtgctggtcatctaccaggacaagaacagacccagcggcatccccgagagattcagcggcagcaatagcggcaataccgccacactgacaatcagcggcacccaggctatggacgaggccgattactactgcgccacctacacaggcttcggcagcctggctgtttttggaggcggcaccaaactgaccgtgctgcatcaccaccatcaccac

SEQ ID NO: 2616 - DNA, 1569 bp, Artificial Sequence
  Synthetic Polynucleotide
atggccttaccagtgaccgccttgctcctgccgctggccttgctgctccacgccgccaggccggacttcgtgatgacacagagccctgatagcctggccgtgtctctcggcgagcgagtgaccatgagctgcaagtctagccagagcctgctgaacagcggcaaccagaagaactacctgacctggtatcagcagaagcccggccagcctcctaagctgctgatctactgggccagcaccagagaaagcggcgtgcccgatagattttctggctctggcagcggcaccgacttcaccctgacaatttctagcctgcaagccgaggacgtggccgtgtactactgccagaacgactacagctacccctacaccttcggccagggcaccaagctggaaatcaaaggcggaggcggaagtggaggcggaggatctggcggcggaggctctgaagtgcaactggttcagagcggagccgagctgaagaaacctggggccagcgtgaaggtgtcctgtaaagccagcggctacacctttaccgactactacatgaaatgggtccgacaggccccaggccagggactcgaatggatcggcgatattatccccagcaacggggccaccttctacaaccagaaattcaagggccgcgtgaccatcaccgtggacaagagcacaagcaccgcctacatggaactgagcagcctgagaagcgaggacaccgccgtgtattattgcgccagaagccatctgctgcgggccagttggttcgcctattggggacagggaaccctggtcaccgttagctctacgcgtacgcgtggaggtggtggctccgaagtgcagctggttcagtctggggccgaagtgaagaagcctggcgagagcctgcggatcagctgtaaaggcagcggctacagcttcagcacctactggatctcttgggtccgacagatgcccggcaaaggactggaatggatgggcaagatctaccccggcgacagctacaccaactacagccctagcttccagggccaagtgaccatcagcgccgacaagagcatcagcacagcctacctccagtggtcctctctgaaggccagcgacaccgccatgtactactgtgccagaggctacggcatcttcgactattggggccagggcaccctggtcacagtttctagcggaggcggaggatctggtggcggaggaagtggcggaggcggttcttcttatgagctgacccagcctccaagcgtgtccgtgtctcctggacagacagccagcatcacctgtagcggcgacaacatcggcgatcagtacgcccactggtatcagcagaagcccggacagtctcccgtgctggtcatctaccaggacaagaacagacccagcggcatccccgagagattcagcggcagcaatagcggcaataccgccacactgacaatcagcggcacccaggctatggacgaggccgattactactgcgccacctacacaggcttcggcagcctggctgtttttggaggcggcaccaaactgaccgtgctgcatcaccaccatcaccac

SEQ ID NO: 2617 - DNA, 1569 bp, Artificial Sequence
  Synthetic Polynucleotide
atggccttaccagtgaccgccttgctcctgccgctggccttgctgctccacgccgccaggccggacttcgtgatgacacagagccctgatagcctggccgtgtctctcggcgagcgagtgaccatgagctgcaagtctagccagagcctgctgaacagcggcaaccagaagaactacctgacctggtatcagcagaagcccggccagcctcctaagctgctgatctactgggccagcaccagagaaagcggcgtgcccgatagattttctggctctggcagcggcaccgacttcaccctgacaatttctagcctgcaagccgaggacgtggccgtgtactactgccagaacgactacagctacccctacaccttcggccagggcaccaagctggaaatcaaaggcggaggcggaagtggaggcggaggatctggcggcggaggctctcaagtgcaactggttcagagcggagccgagctgaagaaacctggggccagcgtgaaggtgtcctgtaaagccagcggctacacctttaccgactactacatgaaatgggtccgacaggccccaggccagggactcgaatggatcggcgatattatccccagcaacggggccaccttctacaaccagaaattcaagggccgcgtgaccatcaccgtggacaagagcacaagcaccgcctacatggaactgagcagcctgagaagcgaggacaccgccgtgtattattgcgccagaagccatctgctgcgggccagttggttcgcctattggggacagggaaccctggtcaccgttagctctacgcgtacgcgtggaggtggtggctccgaagtgcagctggttcagtctggggccgaagtgaagaagcctggcgagagcctgcggatcagctgtaaaggcagcggctacagcttcagcacctactggatctcttgggtccgacagatgcccggcaaaggactggaatggatgggcaagatctaccccggcgacagctacaccaactacagccctagcttccagggccaagtgaccatcagcgccgacaagagcatcagcacagcctacctccagtggtcctctctgaaggccagcgacaccgccatgtactactgtgccagaggctacggcatcttcgactattggggccagggcaccctggtcacagtttctagcggaggcggaggatctggtggcggaggaagtggcggaggcggttcttcttatgagctgacccagcctccaagcgtgtccgtgtctcctggacagacagccagcatcacctgtagcggcgacaacatcggcgatcagtacgcccactggtatcagcagaagcccggacagtctcccgtgctggtcatctaccaggacaagaacagacccagcggcatccccgagagattcagcggcagcaatagcggcaataccgccacactgacaatcagcggcacccaggctatggacgaggccgattactactgcgccacctacacaggcttcggcagcctggctgtttttggaggcggcaccaaactgaccgtgctgcatcaccaccatcaccac

SEQ ID NO: 2618 - DNA, 1572 bp, Artificial Sequence
  Synthetic Polynucleotide
atggccttaccagtgaccgccttgctcctgccgctggccttgctgctccacgccgccaggccggacatcgtgatgacacagagcccttctagcctggccgtgtctgagggcgagacagtgaccatcaactgcaagagcagccagagcttcctgtctagcggcgacggcaagaattacgtggcctggtatcagtacaagcccggacagagccccaagctgctgatctactgggccagcacaagacagagcggcgtgcccgatagattcatcggctctggcagcggcaccgacttcaccctgacaatctctacagtgcaggccgaggacctggctatctactactgccagcagtattacgacacccctctgacctttggctccggcaccaagctggaaatcaaaggcggaggcggaagtggaggcggaggatctggcggcggaggctctgaagtgaagctgcaagagtctggccccagcctggtgcagagtagccaaacactgagcctgacctgtaccgtgtccggctttagcctgaccagctaccacatccactgggtccgacagacccctggcaaaggactggaatggatgggcgtgatgtggagcgacggcgacaccagctataacagcgccctgaagtcccggctgagcatcagcagagatacaagccagagccaggtgttcctgaagatgaacagcctccagaccgaggacaccgccacctactattgtgccagaggctactacagcagctacctgtacctttggttcgcctattggggccagggcaccctggttacagtcagctctacgcgtacgcgtggaggtggtggctccgaagtgcagctggttcagtctggggccgaagtgaagaagcctggcgagagcctgcggatcagctgtaaaggcagcggctacagcttcagcacctactggatctcttgggtccgacagatgcccggcaaaggactggaatggatgggcaagatctaccccggcgacagctacaccaactacagccctagcttccagggccaagtgaccatcagcgccgacaagagcatcagcacagcctacctccagtggtcctctctgaaggccagcgacaccgccatgtactactgtgccagaggctacggcatcttcgactattggggccagggcaccctggtcacagtttctagcggaggcggaggatctggtggcggaggaagtggcggaggcggttcttcttatgagctgacccagcctccaagcgtgtccgtgtctcctggacagacagccagcatcacctgtagcggcgacaacatcggcgatcagtacgcccactggtatcagcagaagcccggacagtctcccgtgctggtcatctaccaggacaagaacagacccagcggcatccccgagagattcagcggcagcaatagcggcaataccgccacactgacaatcagcggcacccaggctatggacgaggccgattactactgcgccacctacacaggcttcggcagcctggctgtttttggaggcggcaccaaactgaccgtgctgcatcaccaccatcaccac

SEQ ID NO: 2619 - DNA, 1584 bp, Artificial Sequence
  Synthetic Polynucleotide
atggccttaccagtgaccgccttgctcctgccgctggccttgctgctccacgccgccaggccggacgtgctgatgacccagacacctgtgtctctgccagtgtctctcggaggccaggtgtccatctcctgtagaagcagccagagcctggtgcactccgacggcgatacctacctgcactggtatctccagaagcctggacagagccctcagctcctgatctaccgggtgtccaacagattcagcggcgtgcccgatagattttccggcagcggctctggcaccgacttcaccctgaagatcagcagagtggaacccgaggacctgggcctgtactactgtctccagaccacacacttcccaccttggacctttggcggaggcaccaagctggaaatgaaaggcggaggcggaagtggaggcggaggatctggcggcggaggctctcaggttcagctccagcagtctggacccgagcttagaaggccaggatctagcgtcagactgagctgcaaggccagcggctaccggatcaaggacttcctgatccactggattaagaacagacccgagcacggcctggaatggatcggatggattgaccctgaggacggcgagactaagtacgcccagaagttccagaccaaggccacactgaccgccgacacctctagcaacaccgcctacatgcaactgagcagcctgaccagcgaggacaccgccacctacttttgtgctagatggggcgacgtgtactacggcctgatgagaggccatgtgatggatgcctggggccagggaacaagcgtgacagtctcttctacgcgtacgcgtggaggtggtggctccgaagtgcagctggttcagtctggggccgaagtgaagaagcctggcgagagcctgcggatcagctgtaaaggcagcggctacagcttcagcacctactggatctcttgggtccgacagatgcccggcaaaggactggaatggatgggcaagatctaccccggcgacagctacaccaactacagccctagcttccagggccaagtgaccatcagcgccgacaagagcatcagcacagcctacctccagtggtcctctctgaaggccagcgacaccgccatgtactactgtgccagaggctacggcatcttcgactattggggccagggcaccctggtcacagtttctagcggaggcggaggatctggtggcggaggaagtggcggaggcggttcttcttatgagctgacccagcctccaagcgtgtccgtgtctcctggacagacagccagcatcacctgtagcggcgacaacatcggcgatcagtacgcccactggtatcagcagaagcccggacagtctcccgtgctggtcatctaccaggacaagaacagacccagcggcatccccgagagattcagcggcagcaatagcggcaataccgccacactgacaatcagcggcacccaggctatggacgaggccgattactactgcgccacctacacaggcttcggcagcctggctgtttttggaggcggcaccaaactgaccgtgctgcatcaccaccatcaccac

SEQ ID NO: 2620 - DNA, 1557 bp, Artificial Sequence
  Synthetic Polynucleotide
atggccttaccagtgaccgccttgctcctgccgctggccttgctgctccacgccgccaggccggacatccagatgacccagtctaccagttccctgagtgcatccctcggagacagggtgacgatcagttgcagcgcaagccaagggatcaataactatctgaactggtatcagcagaaaccggacggaacagtcgaactcctgatttattacaccagcacccttcagagtggcgtcccttcccggttcagtggctccggaagcgggaccgattactccctgaccatttctaatctggagccagaggacataggaacgtattattgccagcagtatagtaaactgccacgaacttttggaggggggacgaaactggagatcaaaggcggaggcggaagtggaggcggaggatctggcggcggaggctctcaggtgcaactccagcagtccggaagcgagcttatgatgccaggggcatcagtgaagatcagctgcaaggctactggctacaccttctctaattactggatagagtgggttaaacaaaggccagggcacggcctggaatggatcggcgagatcctgcctgggacaggccgaaccatttataacgagaagttcaaaggcaaggctactttcaccgcagatataagctctaatacagtgcaaatgcagctctcttccctgacaagtgaggatagtgccgtgtattattgcgcacgaagagattactatggaaatttttattacgctatggattattggggtcaaggaacaagtgtgaccgttagcagcacgcgtacgcgtggaggtggtggctccgaagtgcagctggttcagtctggggccgaagtgaagaagcctggcgagagcctgcggatcagctgtaaaggcagcggctacagcttcagcacctactggatctcttgggtccgacagatgcccggcaaaggactggaatggatgggcaagatctaccccggcgacagctacaccaactacagccctagcttccagggccaagtgaccatcagcgccgacaagagcatcagcacagcctacctccagtggtcctctctgaaggccagcgacaccgccatgtactactgtgccagaggctacggcatcttcgactattggggccagggcaccctggtcacagtttctagcggaggcggaggatctggtggcggaggaagtggcggaggcggttcttcttatgagctgacccagcctccaagcgtgtccgtgtctcctggacagacagccagcatcacctgtagcggcgacaacatcggcgatcagtacgcccactggtatcagcagaagcccggacagtctcccgtgctggtcatctaccaggacaagaacagacccagcggcatccccgagagattcagcggcagcaatagcggcaataccgccacactgacaatcagcggcacccaggctatggacgaggccgattactactgcgccacctacacaggcttcggcagcctggctgtttttggaggcggcaccaaactgaccgtgctgcatcaccaccatcaccac

SEQ ID NO: 2621 - DNA, 1548 bp, Artificial Sequence
  Synthetic Polynucleotide
atggccttaccagtgaccgccttgctcctgccgctggccttgctgctccacgccgccaggccggacatccagatgacccagagccccagcagcctgtctgccagcgtgggcgacagagtgaccatcacatgcaaggccagccaggacgtgggaatcgccgtggcctggtatcagcagaaacccggcaaggtgcccaagctgctgatctactgggccagcaccagacacaccggcgtgcccgatagattttccggcagcggctccggcaccgacttcaccctgacaatcagctccctccagcccgaggacgtggcaacctactactgccagcagtacagcagctacccctacaccttcggccagggcaccaaggtggaaatcaagggcggaggcggaagtggaggcggaggatctggcggcggaggctctgaagtgcaactggtggaatcaggcggcggactggtgcagcctggcggatctctgagactgagctgtgccgccagcggcttcgacttcagccggtactggatgagctgggtgcgccaggcccctggcaaaggactggaatggatcggcgagatcaaccccgacagcagcaccatcaactacgcccccagcctgaaggacaagttcatcatcagccgggacaacgccaagaacagcctgtacctccagatgaactccctgcgggccgaggacaccgccgtgtactattgcgccagacccgacggcaactactggtacttcgacgtgtggggccagggaaccctcgtgaccgtgtcatctacgcgtacgcgtggaggtggtggctccgaagtgcagctggttcagtctggggccgaagtgaagaagcctggcgagagcctgcggatcagctgtaaaggcagcggctacagcttcagcacctactggatctcttgggtccgacagatgcccggcaaaggactggaatggatgggcaagatctaccccggcgacagctacaccaactacagccctagcttccagggccaagtgaccatcagcgccgacaagagcatcagcacagcctacctccagtggtcctctctgaaggccagcgacaccgccatgtactactgtgccagaggctacggcatcttcgactattggggccagggcaccctggtcacagtttctagcggaggcggaggatctggtggcggaggaagtggcggaggcggttcttcttatgagctgacccagcctccaagcgtgtccgtgtctcctggacagacagccagcatcacctgtagcggcgacaacatcggcgatcagtacgcccactggtatcagcagaagcccggacagtctcccgtgctggtcatctaccaggacaagaacagacccagcggcatccccgagagattcagcggcagcaatagcggcaataccgccacactgacaatcagcggcacccaggctatggacgaggccgattactactgcgccacctacacaggcttcggcagcctggctgtttttggaggcggcaccaaactgaccgtgctgcatcaccaccatcaccac

SEQ ID NO: 2622 - DNA, 1551 bp, Artificial Sequence
  Synthetic Polynucleotide
atggccttaccagtgaccgccttgctcctgccgctggccttgctgctccacgccgccaggccggacatcgtgatgacccagagccagaagagcatgagcaccagcgtgggcgacagagtgagcatcacctgcaaggccagccaggacgtgatcaccggcgtggcctggtaccagcagaagcccggccagagccccaagctgctgatctacagcgccagctacagatacaccggcgtgcccgacagattcaccggcagcggcagcggcaccgacttcaccttcaccatcagcaacgtgcaggccgaggacctggccgtgtactactgccagcagcactacagcacccccctgaccttcggcgccggcaccaagctggagctgaagggcggaggcggaagtggaggcggaggatctggcggcggaggctctcaggtgcagctgcagcagcccggcgccgagctggtgagacccggcgccagcgtgaagctgagctgcaaggccagcggctacagcttcaccacctactggatgaactgggtgaagcagagacccggccagggcctggagtggatcggcatgatccaccccagcgacagcgagaccagactgaaccagaagttcaaggacaaggccaccctgaccgtggacaagagcagcagcaccgcctacatgcagctgagcagccccaccagcgaggacagcgccgtgtactactgcgccagaagcaccatgatcgccaccagagccatggactactggggccagggcaccagcgtgaccgtgagcagcacgcgtacgcgtggaggtggtggctccgaagtgcagctggttcagtctggggccgaagtgaagaagcctggcgagagcctgcggatcagctgtaaaggcagcggctacagcttcagcacctactggatctcttgggtccgacagatgcccggcaaaggactggaatggatgggcaagatctaccccggcgacagctacaccaactacagccctagcttccagggccaagtgaccatcagcgccgacaagagcatcagcacagcctacctccagtggtcctctctgaaggccagcgacaccgccatgtactactgtgccagaggctacggcatcttcgactattggggccagggcaccctggtcacagtttctagcggaggcggaggatctggtggcggaggaagtggcggaggcggttcttcttatgagctgacccagcctccaagcgtgtccgtgtctcctggacagacagccagcatcacctgtagcggcgacaacatcggcgatcagtacgcccactggtatcagcagaagcccggacagtctcccgtgctggtcatctaccaggacaagaacagacccagcggcatccccgagagattcagcggcagcaatagcggcaataccgccacactgacaatcagcggcacccaggctatggacgaggccgattactactgcgccacctacacaggcttcggcagcctggctgtttttggaggcggcaccaaactgaccgtgctgcatcaccaccatcaccac

SEQ ID NO: 2623 - DNA, 1566 bp, Artificial Sequence
  Synthetic Polynucleotide
atggccttaccagtgaccgccttgctcctgccgctggccttgctgctccacgccgccaggccggacgacatccaaatgacacagagtccttctagtttgagtgcgagcgtgggggacagggtgaccattacctgcagggccagccagagcataagctcataccttaattggtaccagcaaaaaccaggtaaggcccctaagctcctgatctacgcggcctcttcacttcaatctggggtcccttcccgcttcagtggctccggcagcggcaccgacttcacgctcactatatcaagtctgcagcctgaggatctcgccacctattactgtcaacaaagttattccacccctttcacctttggaccgggcacgaaagtggatattaagggcggaggcggaagtggaggcggaggatctggcggcggaggctctgtgcacgaggtccagcttgtgcagtccggggcagaggtcaagaagcctggttctagcgtaaaagtgagttgcaaagcctcaggtgggacattttcatcctacgcgatcagttgggttagacaggctcctggtcaagggctggaatggatgggcggaattattccaatcttcggaacagcgaattacgcgcagaagttccagggtagagtaaccatcactgctgacaagtccacctccaccgcatacatggaattgtctagtctccggagcgaggatacggcggtgtattattgtgctacgttcgccctgtttggcttccgcgaacaggctttcgacatctgggggcagggcacgacagtcacggttagtagtacgcgtacgcgtggaggtggtggctccgaagtgcagctggttcagtctggggccgaagtgaagaagcctggcgagagcctgcggatcagctgtaaaggcagcggctacagcttcagcacctactggatctcttgggtccgacagatgcccggcaaaggactggaatggatgggcaagatctaccccggcgacagctacaccaactacagccctagcttccagggccaagtgaccatcagcgccgacaagagcatcagcacagcctacctccagtggtcctctctgaaggccagcgacaccgccatgtactactgtgccagaggctacggcatcttcgactattggggccagggcaccctggtcacagtttctagcggaggcggaggatctggtggcggaggaagtggcggaggcggttcttcttatgagctgacccagcctccaagcgtgtccgtgtctcctggacagacagccagcatcacctgtagcggcgacaacatcggcgatcagtacgcccactggtatcagcagaagcccggacagtctcccgtgctggtcatctaccaggacaagaacagacccagcggcatccccgagagattcagcggcagcaatagcggcaataccgccacactgacaatcagcggcacccaggctatggacgaggccgattactactgcgccacctacacaggcttcggcagcctggctgtttttggaggcggcaccaaactgaccgtgctgcatcaccaccatcaccac

SEQ ID NO: 2624 - DNA, 1551 bp, Artificial Sequence
  Synthetic Polynucleotide
atggccttaccagtgaccgccttgctcctgccgctggccttgctgctccacgccgccaggccggaccagatcgtgctgacccagtcccccgctattatgtccgcatcaccgggcgaaaaagtgacgatctcctgtagcgcttcatctagcgtctcctacatgtattggtatcaacagaaacctgggtctagcccaaagccgtggatctacagaaccagtaaccttgccagtggggtgccagcccgcttcagcggtagtggcagtggaacttcctatagcctcacaataagcaacatggaggctgaagatgccgctgcctattactgccagcagtaccacagttacccaaccacgttcggcgggggaactaagctcgaagtaaaaggcggaggcggaagtggaggcggaggatctggcggcggaggctctgaggtgcagctggtggaatctgggggcggcctggtccaacctaagggatcactcaagctctcttgtgcggccagcggattctctttcaatacctatgctatgaattgggtgagacaggcgcccggaaagggcctcgaatggatagcccatatccggtcaaaatcaaacaatttcgcaacctactatgcggactccgtgaaggaccgattttccatctcccgagatgcctccgagaatattctgttcctgcagatgaataacctcaagacagaggacaccgccatgtactactgtgtgcgccagggcggtgactttcccatggattactgggggcaggggaccagcgtgaccgtgagctctacgcgtacgcgtggaggtggtggctccgaagtgcagctggttcagtctggggccgaagtgaagaagcctggcgagagcctgcggatcagctgtaaaggcagcggctacagcttcagcacctactggatctcttgggtccgacagatgcccggcaaaggactggaatggatgggcaagatctaccccggcgacagctacaccaactacagccctagcttccagggccaagtgaccatcagcgccgacaagagcatcagcacagcctacctccagtggtcctctctgaaggccagcgacaccgccatgtactactgtgccagaggctacggcatcttcgactattggggccagggcaccctggtcacagtttctagcggaggcggaggatctggtggcggaggaagtggcggaggcggttcttcttatgagctgacccagcctccaagcgtgtccgtgtctcctggacagacagccagcatcacctgtagcggcgacaacatcggcgatcagtacgcccactggtatcagcagaagcccggacagtctcccgtgctggtcatctaccaggacaagaacagacccagcggcatccccgagagattcagcggcagcaatagcggcaataccgccacactgacaatcagcggcacccaggctatggacgaggccgattactactgcgccacctacacaggcttcggcagcctggctgtttttggaggcggcaccaaactgaccgtgctgcatcaccaccatcaccac

SEQ ID NO: 2625 - DNA, 1548 bp, Artificial Sequence
  Synthetic Polynucleotide
atggccttaccagtgaccgccttgctcctgccgctggccttgctgctccacgccgccaggccggacgacatccagatgacccagagcagcagcagcttcagcgtgagcctgggcgacagagtgaccatcacctgcatggccagcgaggacatctacatcagactggcctggtaccagcagaagcccggcaacgcccccagactgctgatcagcgccgccaccagcctggagaccggcgtgcccagcagattcagcggcagcggcagcggcaaggactacaccctgagcatcaccagcctgcagaccgaggacgtgggcacctactactgccagcagtactggagcagcccctggaccttcggcggcggcaccaagctggagatcaacggcggaggcggaagtggaggcggaggatctggcggcggaggctctgacgtgcagctgcaggagagcggccccggcctggtgaagcccagccagagcctgagcctgacctgcaccgtgaccggctacagcatcaccagcgactacacctggaactggatcagacagttccccggcaacaagctggagtggatgggctacatcacctacagcggcagcaccagctacaaccccagcctgaagagcagaaacagcatcaccagagacaccagcaagaaccagttcttcctgcagctgaacagcgtgaccaccgaggacaccgccacctactactgcgccagactgggcagaagatacacaatggactactggggccagggcaccagcgtgaccgtgagcagcacgcgtacgcgtggaggtggtggctccgaagtgcagctggttcagtctggggccgaagtgaagaagcctggcgagagcctgcggatcagctgtaaaggcagcggctacagcttcagcacctactggatctcttgggtccgacagatgcccggcaaaggactggaatggatgggcaagatctaccccggcgacagctacaccaactacagccctagcttccagggccaagtgaccatcagcgccgacaagagcatcagcacagcctacctccagtggtcctctctgaaggccagcgacaccgccatgtactactgtgccagaggctacggcatcttcgactattggggccagggcaccctggtcacagtttctagcggaggcggaggatctggtggcggaggaagtggcggaggcggttcttcttatgagctgacccagcctccaagcgtgtccgtgtctcctggacagacagccagcatcacctgtagcggcgacaacatcggcgatcagtacgcccactggtatcagcagaagcccggacagtctcccgtgctggtcatctaccaggacaagaacagacccagcggcatccccgagagattcagcggcagcaatagcggcaataccgccacactgacaatcagcggcacccaggctatggacgaggccgattactactgcgccacctacacaggcttcggcagcctggctgtttttggaggcggcaccaaactgaccgtgctgcatcaccaccatcaccac

SEQ ID NO: 2626 - DNA, 1548 bp, Artificial Sequence
  Synthetic Polynucleotide
atggccctgcctgtgacagctctgctgctgcctctggcactgctgctgcacgccgccagacctgacatccagatgacccagagcagcagcagcttcagcgtgtccctgggcgacagagtgaccatcacatgcaaggccagcgaggacatctacatccggctggcctggtatcagcagaagcccggcaacgcccccagactgctgattagcgccgccacctctctggaaaccggcatccccagcagattctccggctctggcagcggcgaggactacaccctgacaatcaccagcctccagaccgaggacgtggcaacctactactgccagcagtattggaccaccccctggacctttggcggaggcaccaagctggaaatcaagagaggcggaggcggaagtggaggcggaggatctggcggcggaggctctgatgtgcagctccaggaatctggccccggactcgtgaagcctagccagagcctgagcctgacatgcaccgtgaccggctacagcatcaccatcgactacacctggaactggatcagacagttccccggcaacaaactggaatggatgggctacatcacctacagcggcagcaccgactacaaccccagcctgaagtccagaagctccatcaccagagacacctctatgaaccagttcttcttgcagctgaacagcgtgaccaccgaggacaccgccacctactattgcgccagactgggcagaagatacgccctggactattggggccagggcaccagcgtgacagtgtcctctacgcgtacgcgtggaggtggtggctccgaagtgcagctggttcagtctggggccgaagtgaagaagcctggcgagagcctgcggatcagctgtaaaggcagcggctacagcttcagcacctactggatctcttgggtccgacagatgcccggcaaaggactggaatggatgggcaagatctaccccggcgacagctacaccaactacagccctagcttccagggccaagtgaccatcagcgccgacaagagcatcagcacagcctacctccagtggtcctctctgaaggccagcgacaccgccatgtactactgtgccagaggctacggcatcttcgactattggggccagggcaccctggtcacagtttctagcggaggcggaggatctggtggcggaggaagtggcggaggcggttcttcttatgagctgacccagcctccaagcgtgtccgtgtctcctggacagacagccagcatcacctgtagcggcgacaacatcggcgatcagtacgcccactggtatcagcagaagcccggacagtctcccgtgctggtcatctaccaggacaagaacagacccagcggcatccccgagagattcagcggcagcaatagcggcaataccgccacactgacaatcagcggcacccaggctatggacgaggccgattactactgcgccacctacacaggcttcggcagcctggctgtttttggaggcggcaccaaactgaccgtgctgcatcaccaccatcaccac

SEQ ID NO: 2627 - DNA, 1545 bp, Artificial Sequence
  Synthetic Polynucleotide
atggccttaccagtgaccgccttgctcctgccgctggccttgctgctccacgccgccaggccggacgtggtcatgacacagagcccttctagcctgtctgccagcgtgggcgacagagtgaccatcacctgtatggcctccgaggacatctacatccggctggcctggtatcagcagaagcctggaaacgcccctaagctgctgatctacgccgccacctctctggaaacaggcgtgccaagcagattttccggcagcggctctggcaccgatttcaccctgacaatatccagcctccagcctgaggacttcgccacctactactgccagcagtattggagcagcccctggacatttggcggaggcaccaaggtggaaatcaaaggcggaggcggaagtggaggcggaggatctggcggcggaggctctcaggttcagctgcaagagtctggccccggactggtcaagcctagccaaacactgagcctgacctgtaccgtgtccggctacagcatcaccagcgactacacctggaactggatcagacagcctcctggcaacggactggaatggatcggctacatcacctacagcggcagcaccagctacaaccccagcctgaaaagccgggtgctgatctccgtggacaccagcaagaatcaggtgtccctgaagctgagcagcgtgacagccgctgataccgccgtgtactactgtgccagactggggagaagatacacaatggactactggggccagggcaccaccgtgacagtttcttctacgcgtacgcgtggaggtggtggctccgaagtgcagctggttcagtctggggccgaagtgaagaagcctggcgagagcctgcggatcagctgtaaaggcagcggctacagcttcagcacctactggatctcttgggtccgacagatgcccggcaaaggactggaatggatgggcaagatctaccccggcgacagctacaccaactacagccctagcttccagggccaagtgaccatcagcgccgacaagagcatcagcacagcctacctccagtggtcctctctgaaggccagcgacaccgccatgtactactgtgccagaggctacggcatcttcgactattggggccagggcaccctggtcacagtttctagcggaggcggaggatctggtggcggaggaagtggcggaggcggttcttcttatgagctgacccagcctccaagcgtgtccgtgtctcctggacagacagccagcatcacctgtagcggcgacaacatcggcgatcagtacgcccactggtatcagcagaagcccggacagtctcccgtgctggtcatctaccaggacaagaacagacccagcggcatccccgagagattcagcggcagcaatagcggcaataccgccacactgacaatcagcggcacccaggctatggacgaggccgattactactgcgccacctacacaggcttcggcagcctggctgtttttggaggcggcaccaaactgaccgtgctgcatcaccaccatcaccac

SEQ ID NO: 2628 - DNA, 1557 bp, Artificial Sequence
  Synthetic Polynucleotide
atggccttaccagtgaccgccttgctcctgccgctggccttgctgctccacgccgccaggccggagatcgtgctgacacagtctcccgccacactgtcactgtctccaggcgaaagagccacactgagctgtagcgccagcagcagcgtgtcctacatgtactggtatcagcagaagcccggacaggcccctagactgctgatctacagaaccagcaacctggcctctggcatccccgccagattttctggctctggcagcggcaccgatttcaccctgaccataagcagcctggaacctgaggacttcgccgtgtactactgccagcagtaccacagctaccccaccacctttggacagggcaccaaggtggaaatcaagcggacagttggcggaggcggaagtggaggcggaggatctggcggcggaggctctgaagtgcagctggttgaatcaggtggcggcctggttcaacctggcggatctctgagactgtcttgtgccgccagcggcttcagcttcaacacctacgccatgaactgggtccgacaggctcctggcaaaggactggaatgggtgtcccacatcagaagcaagagcaacaacttcgccacctactacgccgacagcgtgaaggacagattcaccatcagccgggacaacgccaagaacagcctgtacctccagatgaactccctgagagccgaggacaccgccgtgtattattgcgccagacaaggcggcgacttccctatggattattggggccagggcaccctggtcaccgtttcttctacgcgtacgcgtggaggtggtggctccgaagtgcagctggttcagtctggggccgaagtgaagaagcctggcgagagcctgcggatcagctgtaaaggcagcggctacagcttcagcacctactggatctcttgggtccgacagatgcccggcaaaggactggaatggatgggcaagatctaccccggcgacagctacaccaactacagccctagcttccagggccaagtgaccatcagcgccgacaagagcatcagcacagcctacctccagtggtcctctctgaaggccagcgacaccgccatgtactactgtgccagaggctacggcatcttcgactattggggccagggcaccctggtcacagtttctagcggaggcggaggatctggtggcggaggaagtggcggaggcggttcttcttatgagctgacccagcctccaagcgtgtccgtgtctcctggacagacagccagcatcacctgtagcggcgacaacatcggcgatcagtacgcccactggtatcagcagaagcccggacagtctcccgtgctggtcatctaccaggacaagaacagacccagcggcatccccgagagattcagcggcagcaatagcggcaataccgccacactgacaatcagcggcacccaggctatggacgaggccgattactactgcgccacctacacaggcttcggcagcctggctgtttttggaggcggcaccaaactgaccgtgctgcatcaccaccatcaccac

SEQ ID NO: 2629 - DNA, 1545 bp, Artificial Sequence
  Synthetic Polynucleotide
atggccttaccagtgaccgccttgctcctgccgctggccttgctgctccacgccgccaggccggacgtggtcatgacacagagcccttctagcctgtctgccagcgtgggcgacagagtgaccatcacctgtaaagccagcgaggacatctacatccggctggcctggtatcagcagaagcctggaaaggcccctaagctgctgatctacgccgccacctctctggaaacaggcgtgccaagcagattttccggcagcggctctggcaccgatttcaccctgacaatatccagcctccagcctgaggacttcgccacctactactgccagcagtattggaccacaccttggacctttggcggaggcaccaaggtggaaatcaaaggcggaggcggaagtggaggcggaggatctggcggcggaggctctcaggtgcagctccaagagtctggccctggactggtcaagcctagccagacactgagcctgacctgtaccgtgtccggctacagcatcaccatcgactacacctggaactggatcagacagcctcctggcaaaggactggaatggatcggctacatcacctacagcggcagcaccgactacaaccccagcctgaaaagccgggtgctgatctccgtggacaccagcaagaatcaggtgtccctgaagctgagcagcgtgacagccgctgataccgccgtgtactactgtgccagactgggcagaagatacgccctggattattggggccagggcaccaccgtgacagtgtcatctacgcgtacgcgtggaggtggtggctccgaagtgcagctggttcagtctggggccgaagtgaagaagcctggcgagagcctgcggatcagctgtaaaggcagcggctacagcttcagcacctactggatctcttgggtccgacagatgcccggcaaaggactggaatggatgggcaagatctaccccggcgacagctacaccaactacagccctagcttccagggccaagtgaccatcagcgccgacaagagcatcagcacagcctacctccagtggtcctctctgaaggccagcgacaccgccatgtactactgtgccagaggctacggcatcttcgactattggggccagggcaccctggtcacagtttctagcggaggcggaggatctggtggcggaggaagtggcggaggcggttcttcttatgagctgacccagcctccaagcgtgtccgtgtctcctggacagacagccagcatcacctgtagcggcgacaacatcggcgatcagtacgcccactggtatcagcagaagcccggacagtctcccgtgctggtcatctaccaggacaagaacagacccagcggcatccccgagagattcagcggcagcaatagcggcaataccgccacactgacaatcagcggcacccaggctatggacgaggccgattactactgcgccacctacacaggcttcggcagcctggctgtttttggaggcggcaccaaactgaccgtgctgcatcaccaccatcaccac

SEQ ID NO: 2630 - DNA, 1548 bp, Artificial Sequence
  Synthetic Polynucleotide
atggccttaccagtgaccgccttgctcctgccgctggccttgctgctccacgccgccaggccggacatccagatgacacagtctccggcgtcactgtccgcctccgtgggggagactgtgactattatttgtagggcatcagttaacatctactcttatttggcctggtaccagcagaagcaaggcaagagtcctcagctgctggtgtataatgcgaagatcctggcagagggcgtgccgagccggttctccggcagcggctcaggtacccaattttccctcaagatcaattcactgcagccagaggactttggcagttactattgtcaacaccactacggcacattcactttcgggtccggtacaaaattggagattaagcgaggcggaggcggaagtggaggcggaggatctggcggcggaggctctcaggtacagttgaaagaaagcgggcctggactggtagcgccttcccaatctctctccatcacgtgcaccatctctggcttctccctgacttcctatggagttcactgggtgaggcagccccccggcaagggactggaatggctggtcgtcatctggtccgacgggtccacaacctacaactccgctctgaaaagtcggctctctatttctaaagataatagcaagagccaggtgtttctgaaaatgaactctctgcagaccgatgatacggccatttactactgcgcttcacactatggctcaaccttggcattcgcttcctggggccacggaacactggtgaccgtttccgcagccacgcgtacgcgtggaggtggtggctccgaagtgcagctggttcagtctggggccgaagtgaagaagcctggcgagagcctgcggatcagctgtaaaggcagcggctacagcttcagcacctactggatctcttgggtccgacagatgcccggcaaaggactggaatggatgggcaagatctaccccggcgacagctacaccaactacagccctagcttccagggccaagtgaccatcagcgccgacaagagcatcagcacagcctacctccagtggtcctctctgaaggccagcgacaccgccatgtactactgtgccagaggctacggcatcttcgactattggggccagggcaccctggtcacagtttctagcggaggcggaggatctggtggcggaggaagtggcggaggcggttcttcttatgagctgacccagcctccaagcgtgtccgtgtctcctggacagacagccagcatcacctgtagcggcgacaacatcggcgatcagtacgcccactggtatcagcagaagcccggacagtctcccgtgctggtcatctaccaggacaagaacagacccagcggcatccccgagagattcagcggcagcaatagcggcaataccgccacactgacaatcagcggcacccaggctatggacgaggccgattactactgcgccacctacacaggcttcggcagcctggctgtttttggaggcggcaccaaactgaccgtgctgcatcaccaccatcaccac

SEQ ID NO: 2631 - DNA, 1572 bp, Artificial Sequence
  Synthetic Polynucleotide
atggccttaccagtgaccgccttgctcctgccgctggccttgctgctccacgccgccaggccggacattgtgatgacccagtctcacaaattcatgtccacatcagtaggagacagggtcagcgtcacctgcaaggccagtcagaatgtgggtaataatgtagcctggtatcaacagaaaccagggcaatctcctaaagtactgatttactcggcatcctaccggtacagtggagtccctgatcgcttcacaggcagtggatctgggacagatttcactctcaccatcagtaatgtgcagtctgaagacttggcagagtatttctgtcagcaatataacacctatccattcacgttcggctcggggacaaagttggaaataaaaggcggaggcggaagtggaggcggaggatctggcggcggaggctctgaggtacagctggaggaaagcggtggaggactggtgcaacctggagggtctatgaagctctcttgcgtagcttctgggttcacgttctccaattactggatgaactgggtgcggcagtcccccgagaaaggcctggaatgggtagcagaaattcggttcaagtcccataactatgctacacactttgccgagtctgtcaaaggccggttcactattagtcgagacgacagcaagtcttcagtctacctgcagatgaataacttgcgggcagaggacacaggtatctactactgcaccaggagaatcggcaactccgactatgactggtggtactttgacgtctggggagcaggcaccagcgtgacggtgagttcagcctcaacgcgtacgcgtggaggtggtggctccgaagtgcagctggttcagtctggggccgaagtgaagaagcctggcgagagcctgcggatcagctgtaaaggcagcggctacagcttcagcacctactggatctcttgggtccgacagatgcccggcaaaggactggaatggatgggcaagatctaccccggcgacagctacaccaactacagccctagcttccagggccaagtgaccatcagcgccgacaagagcatcagcacagcctacctccagtggtcctctctgaaggccagcgacaccgccatgtactactgtgccagaggctacggcatcttcgactattggggccagggcaccctggtcacagtttctagcggaggcggaggatctggtggcggaggaagtggcggaggcggttcttcttatgagctgacccagcctccaagcgtgtccgtgtctcctggacagacagccagcatcacctgtagcggcgacaacatcggcgatcagtacgcccactggtatcagcagaagcccggacagtctcccgtgctggtcatctaccaggacaagaacagacccagcggcatccccgagagattcagcggcagcaatagcggcaataccgccacactgacaatcagcggcacccaggctatggacgaggccgattactactgcgccacctacacaggcttcggcagcctggctgtttttggaggcggcaccaaactgaccgtgctgcatcaccaccatcaccac

SEQ ID NO: 2632 - DNA, 1560 bp, Artificial Sequence
  Synthetic Polynucleotide
atggccttaccagtgaccgccttgctcctgccgctggccttgctgctccacgccgccaggccggacatcgtgatgacccagagccccgatagcctggccgtgtctctgggagagagagccaccatcaactgccgggccagcaagagcgtgtccaccagcggctacagcttcatgcactggtatcagcagaagcccggccagccccccaagctgctgatctacctggcctccaacctggaaagcggcgtgcccgatagattcagcggcagcggctctggcaccgacttcaccctgaccatcagttctcttcaggccgaggacgtggccgtgtactactgccagcacagcagagaggtgccctggacattcggccagggcacaaaggtggaaatcaagcggggcggaggcggaagtggaggcggaggatctggcggcggaggctctcaggtgcagctggtgcagtctggggccgaagtgaagaaacctggggccagcgtgaaggtgtcctgcaaggccagcggatacacctttaccaactacggcatgaactgggtgcgccaggcccctggacagggcctggaatggatgggctggatcaacacctacaccggcgagcccacatacgccgacgccttcaagggcagattcgccttcagcctggacaccagcacctccaccgcctacctccagatcaacagcctgcggagcgacgacaccgccgtgtattattgcgccagagattacggcgactacgggatggactattggggccagggaaccaccgtgaccgtgtcctctacgcgtacgcgtggaggtggtggctccgaagtgcagctggttcagtctggggccgaagtgaagaagcctggcgagagcctgcggatcagctgtaaaggcagcggctacagcttcagcacctactggatctcttgggtccgacagatgcccggcaaaggactggaatggatgggcaagatctaccccggcgacagctacaccaactacagccctagcttccagggccaagtgaccatcagcgccgacaagagcatcagcacagcctacctccagtggtcctctctgaaggccagcgacaccgccatgtactactgtgccagaggctacggcatcttcgactattggggccagggcaccctggtcacagtttctagcggaggcggaggatctggtggcggaggaagtggcggaggcggttcttcttatgagctgacccagcctccaagcgtgtccgtgtctcctggacagacagccagcatcacctgtagcggcgacaacatcggcgatcagtacgcccactggtatcagcagaagcccggacagtctcccgtgctggtcatctaccaggacaagaacagacccagcggcatccccgagagattcagcggcagcaatagcggcaataccgccacactgacaatcagcggcacccaggctatggacgaggccgattactactgcgccacctacacaggcttcggcagcctggctgtttttggaggcggcaccaaactgaccgtgctgcatcaccaccatcaccac

SEQ ID NO: 2633 - DNA, 1548 bp, Artificial Sequence
  Synthetic Polynucleotide
atggccttaccagtgaccgccttgctcctgccgctggccttgctgctccacgccgccaggccggacatcgtgatgacccagacccccctgaccctgagcgtgacaatcggacagcctgccagcatctcctgcaagagcagccagagcctgctggacagcgacggcaagacctacctgaactggctgctgcagaggccaggccagagccccgagagactgatctacctggtgtccaagctggactccggcgtgcccgatagattcacaggcagcggctccggcaccgacttcaccctgaagatcagccgggtggaagccgaggacctgggcgtgtactgttgttggcagggcacccacttcccttacaccttcggcggagggaccaaggtggaaatcaagggcggcggaggcggaagtggaggcggaggatctggcggcggaggctctcaggtgcaactgcagcagcctggcgctgaacttgtgcggccaggcgcctctgtgaagctgagctgtaaagccagcggctacaccttcaccagctactggatgaactgggtcaagcagcgcccaggccagggcctggaatggatcggaatgatcgaccccagcgacagcgagacacactacaaccacatcttcaaggacaaggccaccctgaccgtggacaagtccagcagcacagcctacctgcaactgtccagcctgaccagcgaggacagcgccgtgtactactgcgcccggaacctgtatctgtggggccagggaacaagcgtgaccgtgtctagcacgcgtacgcgtggaggtggtggctccgaagtgcagctggttcagtctggggccgaagtgaagaagcctggcgagagcctgcggatcagctgtaaaggcagcggctacagcttcagcacctactggatctcttgggtccgacagatgcccggcaaaggactggaatggatgggcaagatctaccccggcgacagctacaccaactacagccctagcttccagggccaagtgaccatcagcgccgacaagagcatcagcacagcctacctccagtggtcctctctgaaggccagcgacaccgccatgtactactgtgccagaggctacggcatcttcgactattggggccagggcaccctggtcacagtttctagcggaggcggaggatctggtggcggaggaagtggcggaggcggttcttcttatgagctgacccagcctccaagcgtgtccgtgtctcctggacagacagccagcatcacctgtagcggcgacaacatcggcgatcagtacgcccactggtatcagcagaagcccggacagtctcccgtgctggtcatctaccaggacaagaacagacccagcggcatccccgagagattcagcggcagcaatagcggcaataccgccacactgacaatcagcggcacccaggctatggacgaggccgattactactgcgccacctacacaggcttcggcagcctggctgtttttggaggcggcaccaaactgaccgtgctgcatcaccaccatcaccac

SEQ ID NO: 2634 - DNA, 1542 bp, Artificial Sequence
  Synthetic Polynucleotide
atggccttaccagtgaccgccttgctcctgccgctggccttgctgctccacgccgccaggccggacatccagatgacccagagccctgccagcctgtccgtgtctgtgggcgagacagtgaccatcacctgtcgggccagcgagaacatctacagcaacctggcctggtatcagcagaagcagggcaagagcccccaactgctggtgtacgccgccaccaatctggccgatggcgtgcccagcagattttccggctctggcagcggcacccagtacagcctgaagatcaacagcctccagagcgaggacttcggcagctactactgccagcacttctggggcacctggacctttggaggaggcaccaccctggaaatcaagggcggaggcggaagtggaggcggaggatctggcggcggaggctctgaagtgcaactccagcagagcggccctgagcttgtgaagcctggcgcttccgtgaagatgagctgcaaggccagcggctacaccttcaccgactactacatgaagtggatgaagcagagccacggcaagtccctggaatggatcggcgacatcaaccccaacaacggcggcaccacctacaaccagaagttcaagggcaaggccaccctgaccgtggacaagagcagcagcaccgcctacatgcaactgaacagcctgaccagcgaggacagcgccgtgtactactgcgccagagactacggctacggctatttcgactactggggccagggcacaaccctgacagtgtcctctacgcgtacgcgtggaggtggtggctccgaagtgcagctggttcagtctggggccgaagtgaagaagcctggcgagagcctgcggatcagctgtaaaggcagcggctacagcttcagcacctactggatctcttgggtccgacagatgcccggcaaaggactggaatggatgggcaagatctaccccggcgacagctacaccaactacagccctagcttccagggccaagtgaccatcagcgccgacaagagcatcagcacagcctacctccagtggtcctctctgaaggccagcgacaccgccatgtactactgtgccagaggctacggcatcttcgactattggggccagggcaccctggtcacagtttctagcggaggcggaggatctggtggcggaggaagtggcggaggcggttcttcttatgagctgacccagcctccaagcgtgtccgtgtctcctggacagacagccagcatcacctgtagcggcgacaacatcggcgatcagtacgcccactggtatcagcagaagcccggacagtctcccgtgctggtcatctaccaggacaagaacagacccagcggcatccccgagagattcagcggcagcaatagcggcaataccgccacactgacaatcagcggcacccaggctatggacgaggccgattactactgcgccacctacacaggcttcggcagcctggctgtttttggaggcggcaccaaactgaccgtgctgcatcaccaccatcaccac

SEQ ID NO: 2635 - DNA, 1554 bp, Artificial Sequence
  Synthetic Polynucleotide
atggccttaccagtgaccgccttgctcctgccgctggccttgctgctccacgccgccaggccgcagtctgtgctgacacagcctccatctgcctctggcacacctggacagagagtgaccatcagctgtagcggcagcagaagcaacgtcggcggcaactacgtgttctggtatcagcaggtcccaggcgctacccctaagctgctgatctacagaagcaatcagcggcctagcggcgtgcccgatagatttgccggaagcaagagcggcagctctgccagccttgccatctctggactgagaagcgaggacgaggccgactactactgtgccacctgggatgatagcctgagcggcttcgtgtttggcaccggcaccaaagtgacagtgcttggtggcggaggcggaagtggaggcggaggatctggcggcggaggctctgaagttcagctggttgaatctggcggcggactggttaagcctggcggatctctgagactgtcttgtgccgccagcggcttcaccttcagcgattactacatgagctggatcagacaggcccctggcaaaggactggaatgggtgtcctacatcagcagcagcggctccaccatctactacgccgatagcgtgaagggcagattcaccatcagccgggacaacgccaagaacagcctgtacctccagatgaactccctgagagccgaggacaccgccgtgtactattgcgccagaggctacggcaaagcctacgatcaatggggccagggcacactggtcaccgtttcttctacgcgtacgcgtggaggtggtggctccgaagtgcagctggttcagtctggggccgaagtgaagaagcctggcgagagcctgcggatcagctgtaaaggcagcggctacagcttcagcacctactggatctcttgggtccgacagatgcccggcaaaggactggaatggatgggcaagatctaccccggcgacagctacaccaactacagccctagcttccagggccaagtgaccatcagcgccgacaagagcatcagcacagcctacctccagtggtcctctctgaaggccagcgacaccgccatgtactactgtgccagaggctacggcatcttcgactattggggccagggcaccctggtcacagtttctagcggaggcggaggatctggtggcggaggaagtggcggaggcggttcttcttatgagctgacccagcctccaagcgtgtccgtgtctcctggacagacagccagcatcacctgtagcggcgacaacatcggcgatcagtacgcccactggtatcagcagaagcccggacagtctcccgtgctggtcatctaccaggacaagaacagacccagcggcatccccgagagattcagcggcagcaatagcggcaataccgccacactgacaatcagcggcacccaggctatggacgaggccgattactactgcgccacctacacaggcttcggcagcctggctgtttttggaggcggcaccaaactgaccgtgctgcatcaccaccatcaccac

SEQ ID NO: 2636 - DNA, 1551 bp, Artificial Sequence
  Synthetic Polynucleotide
atggccttaccagtgaccgccttgctcctgccgctggccttgctgctccacgccgccaggccgcagtctgtggtcacacagccacctagcatgtctgccgctccaggccagcaagtgaccatctcttgtagcggcggcaacagcaacatcgagcggaactacgtgtcctggtatctgcaactgcctggcacagcccctaagctggtcatcttcgacaacgacagacggcccagcggcatccccgatagattttctggcagcaagagcggcaccagcgccacactgggaattaccggacttcagacaggcgacgaggccgactactactgtggcacatgggactctagcctgagaggctgggttttcggcggaggcacaaagctgacagtgcttggtggcggaggcggaagtggaggcggaggatctggcggcggaggctctgaagtgcagctcgttgagtctggcggcggactgattcaacctggcggaagcctgagactgagctgtgccgcttccggcttcaccttcagcaactacgccatgaactgggttcgacaggcccctggcaaaggactggaatgggtgtccaccatcaacggcagaggcagcagcaccatctacgccgattctgtgaagggcagattcaccatcagccgggacaacagcaagaacaccctgtacctccagatgaactccctgagagccgaggacaccgccacctattactgtgcccggtacatcagcagaggactgggcgattcttggggccagggcacactggttacagtgacgcgtacgcgtggaggtggtggctccgaagtgcagctggttcagtctggggccgaagtgaagaagcctggcgagagcctgcggatcagctgtaaaggcagcggctacagcttcagcacctactggatctcttgggtccgacagatgcccggcaaaggactggaatggatgggcaagatctaccccggcgacagctacaccaactacagccctagcttccagggccaagtgaccatcagcgccgacaagagcatcagcacagcctacctccagtggtcctctctgaaggccagcgacaccgccatgtactactgtgccagaggctacggcatcttcgactattggggccagggcaccctggtcacagtttctagcggaggcggaggatctggtggcggaggaagtggcggaggcggttcttcttatgagctgacccagcctccaagcgtgtccgtgtctcctggacagacagccagcatcacctgtagcggcgacaacatcggcgatcagtacgcccactggtatcagcagaagcccggacagtctcccgtgctggtcatctaccaggacaagaacagacccagcggcatccccgagagattcagcggcagcaatagcggcaataccgccacactgacaatcagcggcacccaggctatggacgaggccgattactactgcgccacctacacaggcttcggcagcctggctgtttttggaggcggcaccaaactgaccgtgctgcatcaccaccatcaccac

SEQ ID NO: 2637 - DNA, 1560 bp, Artificial Sequence
  Synthetic Polynucleotide
atggccttaccagtgaccgccttgctcctgccgctggccttgctgctccacgccgccaggccggacatcgtgctgacccagagccctctgagcctggccgtgtctctgggacagcctgccatcatcagctgcaaggccagccagagcgtgtcctttgccggcacctctctgatgcactggtatcaccagaagcccggccagcagcccagactgctgatctacagagccagcaacctggaagccggcgtgcccgatagattttccggcagcggcagcaagaccgacttcaccctgaccatcagccccgtggaagccgaagatgccgccacctactactgccagcagagcagagagtacccctacaccttcggcggaggcaccaagctggaaatcaagaggggcggaggcggaagtggaggcggaggatctggcggcggaggctctcaggtccaactggtgcagagcggagccgaggtcgtgaagcctggcgcttccgtgaagattagctgcaaagccagcggctacacctttaccggctactttatgaactgggtcaagcagagccctggccagagcctggaatggatcggcagaatccacccctacgacggcgacaccttctacaaccagaagttccagggcaaggccaccctgacagtggacaagagcagcaacaccgcccacatggaactgctgagcctgaccagcgaggacttcgccgtgtactactgcaccagatacgacggcagccgggctatggactattggggccagggcaccaccgtgaccgtgtctagtacgcgtacgcgtggaggtggtggctccgaagtgcagctggttcagtctggggccgaagtgaagaagcctggcgagagcctgcggatcagctgtaaaggcagcggctacagcttcagcacctactggatctcttgggtccgacagatgcccggcaaaggactggaatggatgggcaagatctaccccggcgacagctacaccaactacagccctagcttccagggccaagtgaccatcagcgccgacaagagcatcagcacagcctacctccagtggtcctctctgaaggccagcgacaccgccatgtactactgtgccagaggctacggcatcttcgactattggggccagggcaccctggtcacagtttctagcggaggcggaggatctggtggcggaggaagtggcggaggcggttcttcttatgagctgacccagcctccaagcgtgtccgtgtctcctggacagacagccagcatcacctgtagcggcgacaacatcggcgatcagtacgcccactggtatcagcagaagcccggacagtctcccgtgctggtcatctaccaggacaagaacagacccagcggcatccccgagagattcagcggcagcaatagcggcaataccgccacactgacaatcagcggcacccaggctatggacgaggccgattactactgcgccacctacacaggcttcggcagcctggctgtttttggaggcggcaccaaactgaccgtgctgcatcaccaccatcaccac

SEQ ID NO: 2638 - DNA, 1716 bp, Artificial Sequence
  Synthetic Polynucleotide
atggccttaccagtgaccgccttgctcctgccgctggccttgctgctccacgccgccaggccggacatcctgctgacccagagccccgtgatcctgtccgtgtctcctggcgagagagtgtccttcagctgtcgggccagccagagcatcggcaccaacatccactggtatcagcagcggaccaacggcagccccagactgctgattaagtacgccagcgagtccatcagcggcatccccagcagattttccggcagcggctccggcaccgacttcaccctgagcatcaacagcgtggaaagcgaggacattgccgactactactgccagcagaacaacaactggcccaccaccttcggagccggcaccaagctggaactgaagggcggaggcggaagtggaggcggaggatctggcggcggaggctctcaggtgcagctgaagcagagcggacctggcctggtgcagcctagccagagcctgtccatcacctgtaccgtgtccggcttcagcctgaccaactacggcgtgcactgggtgcgccagagccctggaaaaggactggaatggctgggagtgatttggagcggcggcaacaccgactacaacacccccttcaccagcagactgtctatcaacaaggacaacagcaagagccaggtgttcttcaagatgaacagcctccagagcaacgacaccgccatctactactgtgctagagccctgacctactatgactacgagttcgcctactggggccagggcacactcgtgacagtgtctgctacgcgtacgcgtggctcagcatggtctcatcctcagtttgaaaaaggtggagggtccgggggcggcagtggtggtagtgcttggtcccatccacagtttgaaaagtcgcgttcctccggaggtggtggctcccaggtgcagctggtgcagtctgggggaggcgtggtccagcctgggaggtccctgagactctcctgtaagtcttctggatacaccttcactaggtatacgatgcactgggtccgccaggctccagggaaggggctggagtggattggatacataaatcctagccgtggttatactaattataatcagaaggtgaaggaccgattcaccatctccagagacaactccaagaacacggcctttctgcaaatggacagcctgagacccgaggacacgggtgtgtatttctgtgcgagatattatgatgatcattactgccttgactactggggccagggcaccccggtcaccgtctcctcagtcgaaggtggaagtggaggttctggtggaagtggaggttcaggtggagtggacgacatccagatgacccagtctccatcctccctgtctgcatctgtaggagacagagtcaccatcacttgcagagcaagttcaagcgtaagctacatgaattggtatcagcagacaccagggaaagcccctaagagatggatctatgacacatccaaagtggcttctggggtcccatcaaggttcagtggcagtggatctgggacagattacactttcaccatcagcagtctgcaacctgaagatattgcaacttactactgtcaacagtggagtagtaaccctctcacttttggccaggggaccaagctgcagatcaccgagcagaaactgatctcggaagaggatctgtccggcggcagccatcaccaccatcaccacctcgagtag

SEQ ID NO: 2639 - DNA, 1557 bp, Artificial Sequence
  Synthetic Polynucleotide
atggccttaccagtgaccgccttgctcctgccgctggccttgctgctccacgccgccaggccggacatcctgctgacccagagccccgtgatcctgtccgtgtctcctggcgagagagtgtccttcagctgtcgggccagccagagcatcggcaccaacatccactggtatcagcagcggaccaacggcagccccagactgctgattaagtacgccagcgagtccatcagcggcatccccagcagattttccggcagcggctccggcaccgacttcaccctgagcatcaacagcgtggaaagcgaggacattgccgactactactgccagcagaacaacaactggcccaccaccttcggagccggcaccaagctggaactgaagggcggaggcggaagtggaggcggaggatctggcggcggaggctctcaggtgcagctgaagcagagcggacctggcctggtgcagcctagccagagcctgtccatcacctgtaccgtgtccggcttcagcctgaccaactacggcgtgcactgggtgcgccagagccctggaaaaggactggaatggctgggagtgatttggagcggcggcaacaccgactacaacacccccttcaccagcagactgtctatcaacaaggacaacagcaagagccaggtgttcttcaagatgaacagcctccagagcaacgacaccgccatctactactgtgctagagccctgacctactatgactacgagttcgcctactggggccagggcacactcgtgacagtgtctgctacgcgtacgcgtggaggtggtggctcccaggttcagctggttcagtctggggccgaagtgaagaaacctggggcctctgtgaaggtgtcctgcaaggcttccggctacacctttaccagctactacatccactgggtccgacaggcccctggacaaggactggaatggatcggctgtatctaccccggcaacgtgaacaccaactacaacgagaagttcaaggaccgggccacactgaccgtggacacctctatcagcaccgcctacatggaactgagccggctgagatccgatgataccgccgtgtacttctgcaccagaagccactacggcctggactggaacttcgatgtgtggggccagggcaccaccgtgacagtttctagcggaggcggaggatctggtggcggaggaagtggcggaggcggctctgatattcagatgacacagagcccctccagcctgtctgcctctgtgggagacagagtgaccatcacctgtcacgccagccagaacatctacgtgtggctgaactggtatcagcagaagcccggcaaggcccctaagctgctgatctacaaggccagcaatctgcacaccggcgtgcccagcagattttctggctctggcagcggcaccgacttcaccctgacaatatctagcctccagccagaggacttcgccacctactattgtcagcagggccagacatacccctacaccttcggcggaggcaccaaggtggaaatcaagcatcaccaccatcaccac

SEQ ID NO: 2640 - DNA, 1548 bp, Artificial Sequence
  Synthetic Polynucleotide
atggccttaccagtgaccgccttgctcctgccgctggccttgctgctccacgccgccaggccggacatcctgctgacccagagccccgtgatcctgtccgtgtctcctggcgagagagtgtccttcagctgtcgggccagccagagcatcggcaccaacatccactggtatcagcagcggaccaacggcagccccagactgctgattaagtacgccagcgagtccatcagcggcatccccagcagattttccggcagcggctccggcaccgacttcaccctgagcatcaacagcgtggaaagcgaggacattgccgactactactgccagcagaacaacaactggcccaccaccttcggagccggcaccaagctggaactgaagggcggaggcggaagtggaggcggaggatctggcggcggaggctctcaggtgcagctgaagcagagcggacctggcctggtgcagcctagccagagcctgtccatcacctgtaccgtgtccggcttcagcctgaccaactacggcgtgcactgggtgcgccagagccctggaaaaggactggaatggctgggagtgatttggagcggcggcaacaccgactacaacacccccttcaccagcagactgtctatcaacaaggacaacagcaagagccaggtgttcttcaagatgaacagcctccagagcaacgacaccgccatctactactgtgctagagccctgacctactatgactacgagttcgcctactggggccagggcacactcgtgacagtgtctgctacgcgtacgcgtggaggtggtggctccgaagtgcagctggttcagtctggggccgaagtgaagaagcctggcgagagcctgcggatcagctgtaaaggcagcggctacagcttcagcacctactggatctcttgggtccgacagatgcccggcaaaggactggaatggatgggcaagatctaccccggcgacagctacaccaactacagccctagcttccagggccaagtgaccatcagcgccgacaagagcatcagcacagcctacctccagtggtcctctctgaaggccagcgacaccgccatgtactactgtgccagaggctacggcatcttcgactattggggccagggcaccctggtcacagtttctagcggaggcggaggatctggtggcggaggaagtggcggaggcggttcttcttatgagctgacccagcctccaagcgtgtccgtgtctcctggacagacagccagcatcacctgtagcggcgacaacatcggcgatcagtacgcccactggtatcagcagaagcccggacagtctcccgtgctggtcatctaccaggacaagaacagacccagcggcatccccgagagattcagcggcagcaatagcggcaataccgccacactgacaatcagcggcacccaggctatggacgaggccgattactactgcgccacctacacaggcttcggcagcctggctgtttttggaggcggcaccaaactgaccgtgctgcatcaccaccatcaccac

SEQ ID NO: 2641 - DNA, 1758 bp, Artificial Sequence
  Synthetic Polynucleotide
atggccttaccagtgaccgccttgctcctgccgctggccttgctgctccacgccgccaggccggacgtggtcatgacacagaccccactgagcctgcctgtgtctctgggagatcaggccagcatctcctgtagaagcagccagagcctggtgcacagcaacggcaacacctacctgcggtggtatctccagaagcctggacagagccccaaggtgctgatctacaaggtgtccaacagagtgtccggcgtgcccgatagattttctggcagcggctctggcaccgacttcaccctgaagatcaatagagtggaagccgaggacctgggcgtgtacttctgtagccagagcacccatgtgccttggacctttggcggaggcaccaagctggaaatcaagagcagcgccgacgacgccaagaaggacgccgccaaaaaggatgatgccaagaaagacgatgctaaaaaagacggcggcgtgaagctggacgagacaggcggaggacttgttcaacctggcggagccatgaagctgagctgtgtgaccagcggctttaccttcggccactactggatgaactgggtccgacagtcccctgagaaaggactggaatgggtcgcccagttcagaaacaagccctacaactacgaaacctactacagcgacagcgtgaagggcagattcaccatcagccgggacgacagcaagtccagcgtgtacctccagatgaacaacctgcgcgtggaagataccggcatctactactgtaccggggccagctacggcatggaatatctcggccagggcaccagcgtgaccgtgtctacaacgcgtacgcgtggctcagcatggtctcatcctcagtttgaaaaaggtggagggtccgggggcggcagtggtggtagtgcttggtcccatccacagtttgaaaagtcgcgttcctccggaggtggtggctcccaggtgcagctggtgcagtctgggggaggcgtggtccagcctgggaggtccctgagactctcctgtaagtcttctggatacaccttcactaggtatacgatgcactgggtccgccaggctccagggaaggggctggagtggattggatacataaatcctagccgtggttatactaattataatcagaaggtgaaggaccgattcaccatctccagagacaactccaagaacacggcctttctgcaaatggacagcctgagacccgaggacacgggtgtgtatttctgtgcgagatattatgatgatcattactgccttgactactggggccagggcaccccggtcaccgtctcctcagtcgaaggtggaagtggaggttctggtggaagtggaggttcaggtggagtggacgacatccagatgacccagtctccatcctccctgtctgcatctgtaggagacagagtcaccatcacttgcagagcaagttcaagcgtaagctacatgaattggtatcagcagacaccagggaaagcccctaagagatggatctatgacacatccaaagtggcttctggggtcccatcaaggttcagtggcagtggatctgggacagattacactttcaccatcagcagtctgcaacctgaagatattgcaacttactactgtcaacagtggagtagtaaccctctcacttttggccaggggaccaagctgcagatcaccgagcagaaactgatctcggaagaggatctgtccggcggcagccatcaccaccatcaccacctcgagtag

SEQ ID NO: 2642 - DNA, 1599 bp, Artificial Sequence
  Synthetic Polynucleotide
atggccttaccagtgaccgccttgctcctgccgctggccttgctgctccacgccgccaggccggacgtggtcatgacacagaccccactgagcctgcctgtgtctctgggagatcaggccagcatctcctgtagaagcagccagagcctggtgcacagcaacggcaacacctacctgcggtggtatctccagaagcctggacagagccccaaggtgctgatctacaaggtgtccaacagagtgtccggcgtgcccgatagattttctggcagcggctctggcaccgacttcaccctgaagatcaatagagtggaagccgaggacctgggcgtgtacttctgtagccagagcacccatgtgccttggacctttggcggaggcaccaagctggaaatcaagagcagcgccgacgacgccaagaaggacgccgccaaaaaggatgatgccaagaaagacgatgctaaaaaagacggcggcgtgaagctggacgagacaggcggaggacttgttcaacctggcggagccatgaagctgagctgtgtgaccagcggctttaccttcggccactactggatgaactgggtccgacagtcccctgagaaaggactggaatgggtcgcccagttcagaaacaagccctacaactacgaaacctactacagcgacagcgtgaagggcagattcaccatcagccgggacgacagcaagtccagcgtgtacctccagatgaacaacctgcgcgtggaagataccggcatctactactgtaccggggccagctacggcatggaatatctcggccagggcaccagcgtgaccgtgtctacaacgcgtacgcgtggaggtggtggctcccaggttcagctggttcagtctggggccgaagtgaagaaacctggggcctctgtgaaggtgtcctgcaaggcttccggctacacctttaccagctactacatccactgggtccgacaggcccctggacaaggactggaatggatcggctgtatctaccccggcaacgtgaacaccaactacaacgagaagttcaaggaccgggccacactgaccgtggacacctctatcagcaccgcctacatggaactgagccggctgagatccgatgataccgccgtgtacttctgcaccagaagccactacggcctggactggaacttcgatgtgtggggccagggcaccaccgtgacagtttctagcggaggcggaggatctggtggcggaggaagtggcggaggcggctctgatattcagatgacacagagcccctccagcctgtctgcctctgtgggagacagagtgaccatcacctgtcacgccagccagaacatctacgtgtggctgaactggtatcagcagaagcccggcaaggcccctaagctgctgatctacaaggccagcaatctgcacaccggcgtgcccagcagattttctggctctggcagcggcaccgacttcaccctgacaatatctagcctccagccagaggacttcgccacctactattgtcagcagggccagacatacccctacaccttcggcggaggcaccaaggtggaaatcaagcatcaccaccatcaccac

SEQ ID NO: 2643 - DNA, 1590 bp, Artificial Sequence
  Synthetic Polynucleotide
atggccttaccagtgaccgccttgctcctgccgctggccttgctgctccacgccgccaggccggacgtggtcatgacacagaccccactgagcctgcctgtgtctctgggagatcaggccagcatctcctgtagaagcagccagagcctggtgcacagcaacggcaacacctacctgcggtggtatctccagaagcctggacagagccccaaggtgctgatctacaaggtgtccaacagagtgtccggcgtgcccgatagattttctggcagcggctctggcaccgacttcaccctgaagatcaatagagtggaagccgaggacctgggcgtgtacttctgtagccagagcacccatgtgccttggacctttggcggaggcaccaagctggaaatcaagagcagcgccgacgacgccaagaaggacgccgccaaaaaggatgatgccaagaaagacgatgctaaaaaagacggcggcgtgaagctggacgagacaggcggaggacttgttcaacctggcggagccatgaagctgagctgtgtgaccagcggctttaccttcggccactactggatgaactgggtccgacagtcccctgagaaaggactggaatgggtcgcccagttcagaaacaagccctacaactacgaaacctactacagcgacagcgtgaagggcagattcaccatcagccgggacgacagcaagtccagcgtgtacctccagatgaacaacctgcgcgtggaagataccggcatctactactgtaccggggccagctacggcatggaatatctcggccagggcaccagcgtgaccgtgtctacaacgcgtacgcgtggaggtggtggctccgaagtgcagctggttcagtctggggccgaagtgaagaagcctggcgagagcctgcggatcagctgtaaaggcagcggctacagcttcagcacctactggatctcttgggtccgacagatgcccggcaaaggactggaatggatgggcaagatctaccccggcgacagctacaccaactacagccctagcttccagggccaagtgaccatcagcgccgacaagagcatcagcacagcctacctccagtggtcctctctgaaggccagcgacaccgccatgtactactgtgccagaggctacggcatcttcgactattggggccagggcaccctggtcacagtttctagcggaggcggaggatctggtggcggaggaagtggcggaggcggttcttcttatgagctgacccagcctccaagcgtgtccgtgtctcctggacagacagccagcatcacctgtagcggcgacaacatcggcgatcagtacgcccactggtatcagcagaagcccggacagtctcccgtgctggtcatctaccaggacaagaacagacccagcggcatccccgagagattcagcggcagcaatagcggcaataccgccacactgacaatcagcggcacccaggctatggacgaggccgattactactgcgccacctacacaggcttcggcagcctggctgtttttggaggcggcaccaaactgaccgtgctgcatcaccaccatcaccac

SEQ ID NO: 2644 - DNA, 1731 bp, Artificial Sequence
  Synthetic Polynucleotide
atggccttaccagtgaccgccttgctcctgccgctggccttgctgctccacgccgccaggccggagctggtcatgacacagagccctgcttctctggccgtgtcactgggacagagagccaccatctcttgcagagccagcgagagcgtggacagctacggcaagagcttcatgcactggtatcagctcaagcccggccagcctcctaagctgctgatctacagagcctccaacctggaaagcggcgtgccagccagattttctggcagcggcagcagaaccgacttcaccctgaccattgatcccgtggaagccgatgatgccgccacctactactgccagcagaacaacgaggacccctggacatttggcggaggcaccaagctggaaatcaaaggcggaggcggaagtggaggcggaggatctggcggcggaggctctgaagtgcagctcgaacagtctggccccgagcttgtgaaacctggcgcttccgtgaagatgagctgcaaggccagcggctacaccttcaccaactactacatgaaatgggtcaagcagagccacggcaagtccctggaatggatcggcgatctgaaccccaacaacggcgacaccttctacaaccagaagttcaagggcaaagccacactgaccgtggacaagagcagcaacaccgcctacatgcagctcaactccctgaccagcgaggacagcgccgtgtactactgtgccagaaccggcagatacgaagagaacgctatggactactggggccagggcacaagcgtgacagtctcttctacgcgtacgcgtggctcagcatggtctcatcctcagtttgaaaaaggtggagggtccgggggcggcagtggtggtagtgcttggtcccatccacagtttgaaaagtcgcgttcctccggaggtggtggctcccaggtgcagctggtgcagtctgggggaggcgtggtccagcctgggaggtccctgagactctcctgtaagtcttctggatacaccttcactaggtatacgatgcactgggtccgccaggctccagggaaggggctggagtggattggatacataaatcctagccgtggttatactaattataatcagaaggtgaaggaccgattcaccatctccagagacaactccaagaacacggcctttctgcaaatggacagcctgagacccgaggacacgggtgtgtatttctgtgcgagatattatgatgatcattactgccttgactactggggccagggcaccccggtcaccgtctcctcagtcgaaggtggaagtggaggttctggtggaagtggaggttcaggtggagtggacgacatccagatgacccagtctccatcctccctgtctgcatctgtaggagacagagtcaccatcacttgcagagcaagttcaagcgtaagctacatgaattggtatcagcagacaccagggaaagcccctaagagatggatctatgacacatccaaagtggcttctggggtcccatcaaggttcagtggcagtggatctgggacagattacactttcaccatcagcagtctgcaacctgaagatattgcaacttactactgtcaacagtggagtagtaaccctctcacttttggccaggggaccaagctgcagatcaccgagcagaaactgatctcggaagaggatctgtccggcggcagccatcaccaccatcaccacctcgagtag

SEQ ID NO: 2645 - DNA, 1572 bp, Artificial Sequence
  Synthetic Polynucleotide
atggccttaccagtgaccgccttgctcctgccgctggccttgctgctccacgccgccaggccggagctggtcatgacacagagccctgcttctctggccgtgtcactgggacagagagccaccatctcttgcagagccagcgagagcgtggacagctacggcaagagcttcatgcactggtatcagctcaagcccggccagcctcctaagctgctgatctacagagcctccaacctggaaagcggcgtgccagccagattttctggcagcggcagcagaaccgacttcaccctgaccattgatcccgtggaagccgatgatgccgccacctactactgccagcagaacaacgaggacccctggacatttggcggaggcaccaagctggaaatcaaaggcggaggcggaagtggaggcggaggatctggcggcggaggctctgaagtgcagctcgaacagtctggccccgagcttgtgaaacctggcgcttccgtgaagatgagctgcaaggccagcggctacaccttcaccaactactacatgaaatgggtcaagcagagccacggcaagtccctggaatggatcggcgatctgaaccccaacaacggcgacaccttctacaaccagaagttcaagggcaaagccacactgaccgtggacaagagcagcaacaccgcctacatgcagctcaactccctgaccagcgaggacagcgccgtgtactactgtgccagaaccggcagatacgaagagaacgctatggactactggggccagggcacaagcgtgacagtctcttctacgcgtacgcgtggaggtggtggctcccaggttcagctggttcagtctggggccgaagtgaagaaacctggggcctctgtgaaggtgtcctgcaaggcttccggctacacctttaccagctactacatccactgggtccgacaggcccctggacaaggactggaatggatcggctgtatctaccccggcaacgtgaacaccaactacaacgagaagttcaaggaccgggccacactgaccgtggacacctctatcagcaccgcctacatggaactgagccggctgagatccgatgataccgccgtgtacttctgcaccagaagccactacggcctggactggaacttcgatgtgtggggccagggcaccaccgtgacagtttctagcggaggcggaggatctggtggcggaggaagtggcggaggcggctctgatattcagatgacacagagcccctccagcctgtctgcctctgtgggagacagagtgaccatcacctgtcacgccagccagaacatctacgtgtggctgaactggtatcagcagaagcccggcaaggcccctaagctgctgatctacaaggccagcaatctgcacaccggcgtgcccagcagattttctggctctggcagcggcaccgacttcaccctgacaatatctagcctccagccagaggacttcgccacctactattgtcagcagggccagacatacccctacaccttcggcggaggcaccaaggtggaaatcaagcatcaccaccatcaccac

SEQ ID NO: 2646 - protein, 521 aa, Artificial Sequence
  Synthetic Polypeptide
MALPVTALLLPLALLLHAARPDIQMTQTTSSLSASLGDRVTISCRASQDISKYLNWYQQKPDGTVKLLIYHTSRLHSGVPSRFSGSGSGTDYSLTISNLEQEDIATYFCQQGNTLPYTFGGGTKLEITGGGGSGGGGSGGGGSEVKLQESGPGLVAPSQSLSVTCTVSGVSLPDYGVSWIRQPPRKGLEWLGVIWGSETTYYNSALKSRLTIIKDNSKSQVFLKMNSLQTDDTAIYYCAKHYYYGGSYAMDYWGQGTSVTVSSRVTRGGGGSDIKLQQSGAELARPGASVKMSCKTSGYTFTRYTMHWVKQRPGQGLEWIGYINPSRGYTNYNQKFKDKATLTTDKSSSTAYMQLSSLTSEDSAVYYCARYYDDHYCLDYWGQGTTLTVSSVEGGSGGSGGSGGSGGVDDIQLTQSPAIMSASPGEKVTMTCRASSSVSYMNWYQQKSGTSPKRWIYDTSKVASGVPYRFSGSGSGTSYSLTISSMEAEDAATYYCQQWSSNPLTFGAGTKLELKHHHHHH

SEQ ID NO: 2647 - protein, 521 aa, Artificial Sequence
  Synthetic Polypeptide
MALPVTALLLPLALLLHAARPEIVMTQSPATLSLSPGERATLSCRASQDISKYLNWYQQKPGQAPRLLIYHTSRLHSGIPARFSGSGSGTDYTLTISSLQPEDFAVYFCQQGNTLPYTFGQGTKLEIKGGGGSGGGGSGGGGSQVQLQESGPGLVKPSETLSLTCTVSGVSLPDYGVSWIRQPPGKGLEWIGVIWGSETTYYNSSLKSRVTISKDNSKNQVSLKLSSVTAADTAVYYCAKHYYYGGSYAMDYWGQGTLVTVSSTRTRGGGGSDIKLQQSGAELARPGASVKMSCKTSGYTFTRYTMHWVKQRPGQGLEWIGYINPSRGYTNYNQKFKDKATLTTDKSSSTAYMQLSSLTSEDSAVYYCARYYDDHYCLDYWGQGTTLTVSSVEGGSGGSGGSGGSGGVDDIQLTQSPAIMSASPGEKVTMTCRASSSVSYMNWYQQKSGTSPKRWIYDTSKVASGVPYRFSGSGSGTSYSLTISSMEAEDAATYYCQQWSSNPLTFGAGTKLELKHHHHHH

SEQ ID NO: 2648 - protein, 521 aa, Artificial Sequence
  Synthetic Polypeptide
MALPVTALLLPLALLLHAARPEIVMTQSPATLSLSPGERATLSCRASQDISKYLNWYQQKPGQAPRLLIYHTSRLHSGIPARFSGSGSGTDYTLTISSLQPEDFAVYFCQQGNTLPYTFGQGTKLEIKGGGGSGGGGSGGGGSQVQLQESGPGLVKPSETLSLTCTVSGVSLPDYGVSWIRQPPGKGLEWIGVIWGSETTYYQSSLKSRVTISKDNSKNQVSLKLSSVTAADTAVYYCAKHYYYGGSYAMDYWGQGTLVTVSSTRTRGGGGSDIKLQQSGAELARPGASVKMSCKTSGYTFTRYTMHWVKQRPGQGLEWIGYINPSRGYTNYNQKFKDKATLTTDKSSSTAYMQLSSLTSEDSAVYYCARYYDDHYCLDYWGQGTTLTVSSVEGGSGGSGGSGGSGGVDDIQLTQSPAIMSASPGEKVTMTCRASSSVSYMNWYQQKSGTSPKRWIYDTSKVASGVPYRFSGSGSGTSYSLTISSMEAEDAATYYCQQWSSNPLTFGAGTKLELKHHHHHH

SEQ ID NO: 2649 - protein, 522 aa, Artificial Sequence
  Synthetic Polypeptide
MALPVTALLLPLALLLHAARPDEIVLTQSPATLSLSPGERATLSCSASSSVSYMHWYQQKPGQAPRLLIYDTSKLASGIPARFSGSGSGTDFTLTISSLEPEDVAVYYCFQGSVYPFTFGQGTKLEIKRGGGGSGGGGSGGGGSQVQLQESGPGLVKPSQTLSLTCTVSGGSISTSGMGVGWIRQHPGKGLEWIGHIWWDDDKRYNPALKSRVTISVDTSKNQFSLKLSSVTAADTAVYYCARMELWSYYFDYWGQGTLVTVSSTRTRGGGGSDIKLQQSGAELARPGASVKMSCKTSGYTFTRYTMHWVKQRPGQGLEWIGYINPSRGYTNYNQKFKDKATLTTDKSSSTAYMQLSSLTSEDSAVYYCARYYDDHYCLDYWGQGTTLTVSSVEGGSGGSGGSGGSGGVDDIQLTQSPAIMSASPGEKVTMTCRASSSVSYMNWYQQKSGTSPKRWIYDTSKVASGVPYRFSGSGSGTSYSLTISSMEAEDAATYYCQQWSSNPLTFGAGTKLELKHHHHHH

SEQ ID NO: 2650 - protein, 529 aa, Artificial Sequence
  Synthetic Polypeptide
MALPVTALLLPLALLLHAARPDIQLTQSPASLAVSLGQRATISCKASQSVDYDGDSYLNWYQQIPGQPPKLLIYDASNLVSGIPPRFSGSGSGTDFTLNIHPVEKVDAATYHCQQSTEDPWTFGGGTKLEIKGGGGSGGGGSGGGGSQVQLQQSGAELVRPGSSVKISCKASGYAFSSYWMNWVKQRPGQGLEWIGQIWPGDGDTNYNGKFKGKATLTADESSSTAYMQLSSLASEDSAVYFCARRETTTVGRYYYAMDYWGQGTTVTVSSTRTRGGGGSDIKLQQSGAELARPGASVKMSCKTSGYTFTRYTMHWVKQRPGQGLEWIGYINPSRGYTNYNQKFKDKATLTTDKSSSTAYMQLSSLTSEDSAVYYCARYYDDHYCLDYWGQGTTLTVSSVEGGSGGSGGSGGSGGVDDIQLTQSPAIMSASPGEKVTMTCRASSSVSYMNWYQQKSGTSPKRWIYDTSKVASGVPYRFSGSGSGTSYSLTISSMEAEDAATYYCQQWSSNPLTFGAGTKLELKHHHHHH

SEQ ID NO: 2651 - protein, 546 aa, Artificial Sequence
  Synthetic Polypeptide
MALPVTALLLPLALLLHAARPINIYNAEPANPSEKNSPEFDIVMTQSPATLSLSPGERATLSCRSSKSLQNVNGNTYLYWFQQKPGQSPQLLIYRMSNLNSGVPDRFSGSGSGTEFTLTISSLEPEDFAVYYCMQHLEYPITFGAGTKLEIKGGGGSGGGGSGGGGSEVQLVESGGGLVKPGGSLKLSCAASGYTFTSYVMHWVRQAPGKGLEWIGYINPYNDGTKYNEKFQGRVTISSDKSISTAYMELSSLRSEDTAMYYCARGTYYYGTRVFDYWGQGTLVTVSSTRTRGGGGSDIKLQQSGAELARPGASVKMSCKTSGYTFTRYTMHWVKQRPGQGLEWIGYINPSRGYTNYNQKFKDKATLTTDKSSSTAYMQLSSLTSEDSAVYYCARYYDDHYCLDYWGQGTTLTVSSVEGGSGGSGGSGGSGGVDDIQLTQSPAIMSASPGEKVTMTCRASSSVSYMNWYQQKSGTSPKRWIYDTSKVASGVPYRFSGSGSGTSYSLTISSMEAEDAATYYCQQWSSNPLTFGAGTKLELKHHHHHH

SEQ ID NO: 2652 - protein, 523 aa, Artificial Sequence
  Synthetic Polypeptide
MALPVTALLLPLALLLHAARPDIQMTQSPSSLSASVGDRVTITCKASDHINNWLAWYQQKPGQAPKLLIYGATTLETGVPSRFSGSGSGTDYTLTISSLQPEDFATYYCQQSWNTPWTFGQGTKLEIKRGGGGSGGGGSGGGGSQVQLQQPGAELVKPGASVKMSCKASGYAFSSYWINWMKQKPGQGLEWIGQIYPGDGDTNYNGKFKGRATLTADTSSSTAYMQLSSLTSEDSAVYFCARSITTVVGCAMDYWGQGTSVTVSSTRTRGGGGSDIKLQQSGAELARPGASVKMSCKTSGYTFTRYTMHWVKQRPGQGLEWIGYINPSRGYTNYNQKFKDKATLTTDKSSSTAYMQLSSLTSEDSAVYYCARYYDDHYCLDYWGQGTTLTVSSVEGGSGGSGGSGGSGGVDDIQLTQSPAIMSASPGEKVTMTCRASSSVSYMNWYQQKSGTSPKRWIYDTSKVASGVPYRFSGSGSGTSYSLTISSMEAEDAATYYCQQWSSNPLTFGAGTKLELKHHHHHH

SEQ ID NO: 2653 - protein, 523 aa, Artificial Sequence
  Synthetic Polypeptide
MALPVTALLLPLALLLHAARPDIQMTQSPSSLSASVGDRVTITCSASQDISNYLNWYQQKPGKAPKLLIYYTSNLHSGVPSRFSGSGSGTDFTLTISSLQPEDFATYYCQQYRKLPWTFGQGTKLEIKRGGGGSGGGGSGGGGSQVQLVQSGAEVKKPGSSVKVSCKASGGTFSNYWMHWVRQAPGQGLEWMGATYRGHSDTYYNQKFKGRVTITADKSTSTAYMELSSLRSEDTAVYYCARGAIYDGYDVLDNWGQGTLVTVSSTRTRGGGGSDIKLQQSGAELARPGASVKMSCKTSGYTFTRYTMHWVKQRPGQGLEWIGYINPSRGYTNYNQKFKDKATLTTDKSSSTAYMQLSSLTSEDSAVYYCARYYDDHYCLDYWGQGTTLTVSSVEGGSGGSGGSGGSGGVDDIQLTQSPAIMSASPGEKVTMTCRASSSVSYMNWYQQKSGTSPKRWIYDTSKVASGVPYRFSGSGSGTSYSLTISSMEAEDAATYYCQQWSSNPLTFGAGTKLELKHHHHHH

SEQ ID NO: 2654 - protein, 523 aa, Artificial Sequence
  Synthetic Polypeptide
MALPVTALLLPLALLLHAARPDIVLTQSPATLSLSPGDRATISCRASESVTILGSHLIYWYQQKPGQPPRLLIQLASNVQTGVPARFSGSGSRTDFTLTISSVEPEDFAVYYCLQSRTIPRTFGQGTKLEIKRGGGGSGGGGSGGGGSQVQLVQSGPEVKKPGESVKISCKASGYTFRHYSMNWVKQAPGQGLKWMGRINTESGVPIYADDFKGRFSFTVDTSASTAYLEISSLTSEDTAVYFCSNDYLYSLDFWGQGTTLTVSSTRTRGGGGSDIKLQQSGAELARPGASVKMSCKTSGYTFTRYTMHWVKQRPGQGLEWIGYINPSRGYTNYNQKFKDKATLTTDKSSSTAYMQLSSLTSEDSAVYYCARYYDDHYCLDYWGQGTTLTVSSVEGGSGGSGGSGGSGGVDDIQLTQSPAIMSASPGEKVTMTCRASSSVSYMNWYQQKSGTSPKRWIYDTSKVASGVPYRFSGSGSGTSYSLTISSMEAEDAATYYCQQWSSNPLTFGAGTKLELKHHHHHH

SEQ ID NO: 2655 - protein, 522 aa, Artificial Sequence
  Synthetic Polypeptide
MALPVTALLLPLALLLHAARPDIVLTQSPASLAVSLGERATINCRASESVSVIGAHLIHWYQQKPGQPPKLLIYLASNLETGVPARFSGSGSGTDFTLTISSLQAEDAAIYYCLQSRIFPRTFGQGTKLEIKGGGGSGGGGSGGGGSQVQLVQSGSELKKPGESVKISCKASGYTFTDYSINWVKQAPGQGLKWMGWINTETREPAYAYDFRGRFVFSLDTSASTAYLQISSLKAEDTAVYFCALDYSYAMDYWGQGTLVTVSSTRTRGGGGSDIKLQQSGAELARPGASVKMSCKTSGYTFTRYTMHWVKQRPGQGLEWIGYINPSRGYTNYNQKFKDKATLTTDKSSSTAYMQLSSLTSEDSAVYYCARYYDDHYCLDYWGQGTTLTVSSVEGGSGGSGGSGGSGGVDDIQLTQSPAIMSASPGEKVTMTCRASSSVSYMNWYQQKSGTSPKRWIYDTSKVASGVPYRFSGSGSGTSYSLTISSMEAEDAATYYCQQWSSNPLTFGAGTKLELKHHHHHH

SEQ ID NO: 2656 - protein, 523 aa, Artificial Sequence
  Synthetic Polypeptide
MALPVTALLLPLALLLHAARPDIVLTQSPATLSLSPGDRATLSCRASESVTILGSHLIYWYQQKPGQAPRLLIQLASNVQTGIPARFSGSGSRTDFTLTISSLEPEDFAVYYCLQSRTIPRTFGQGTKLEIKRGGGGSGGGGSGGGGSQVQLVQSGSELKKPGESVKISCKASGYTFTHYSMNWVRQAPGQGLEWMGRINTETGEPLYADDFKGRFVFSLDTSASTAYLQISSLKAEDTAVYYCSNDYLYSLDYWGQGTLVTVSSTRTRGGGGSDIKLQQSGAELARPGASVKMSCKTSGYTFTRYTMHWVKQRPGQGLEWIGYINPSRGYTNYNQKFKDKATLTTDKSSSTAYMQLSSLTSEDSAVYYCARYYDDHYCLDYWGQGTTLTVSSVEGGSGGSGGSGGSGGVDDIQLTQSPAIMSASPGEKVTMTCRASSSVSYMNWYQQKSGTSPKRWIYDTSKVASGVPYRFSGSGSGTSYSLTISSMEAEDAATYYCQQWSSNPLTFGAGTKLELKHHHHHH

SEQ ID NO: 2657 - protein, 524 aa, Artificial Sequence
  Synthetic Polypeptide
MALPVTALLLPLALLLHAARPDEIVLTQSPATLSLSPGERATLSCRASQSVSSYLAWYQQKPGQAPRLLIYDASNRATGIPARFSGSGSGTDFTLTISSLEPEDFAVYYCQQRSNWPITFGQGTRLEIKGGGGSGGGGSGGGGSEVQLVESGGGLVQPGRSLRLSCAASGFTFNDYAMHWVRQAPGKGLEWVSTISWNSGSIGYADSVKGRFTISRDNAKKSLYLQMNSLRAEDTALYYCAKDIQYGNYYYGMDVWGQGTTVTVSSTRTRGGGGSDIKLQQSGAELARPGASVKMSCKTSGYTFTRYTMHWVKQRPGQGLEWIGYINPSRGYTNYNQKFKDKATLTTDKSSSTAYMQLSSLTSEDSAVYYCARYYDDHYCLDYWGQGTTLTVSSVEGGSGGSGGSGGSGGVDDIQLTQSPAIMSASPGEKVTMTCRASSSVSYMNWYQQKSGTSPKRWIYDTSKVASGVPYRFSGSGSGTSYSLTISSMEAEDAATYYCQQWSSNPLTFGAGTKLELKHHHHHH

SEQ ID NO: 2658 - protein, 526 aa, Artificial Sequence
  Synthetic Polypeptide
MALPVTALLLPLALLLHAARPDIVMTQTPLSLPVTPGEPASISCRSSKSLLHSNGITYLYWYLQKPGQSPQLLIYQMSNLVSGVPDRFSGSGSGTDFTLKISRVEAEDVGVYYCAQNLELPYTFGGGTKVEIKRGGGGSGGGGSGGGGSQVQLVQSGAEVKKPGSSVKVSCKASGYAFSYSWINWVRQAPGQGLEWMGRIFPGDGDTDYNGKFKGRVTITADKSTSTAYMELSSLRSEDTAVYYCARNVFDGYWLVYWGQGTLVTVSSTRTRGGGGSDIKLQQSGAELARPGASVKMSCKTSGYTFTRYTMHWVKQRPGQGLEWIGYINPSRGYTNYNQKFKDKATLTTDKSSSTAYMQLSSLTSEDSAVYYCARYYDDHYCLDYWGQGTTLTVSSVEGGSGGSGGSGGSGGVDDIQLTQSPAIMSASPGEKVTMTCRASSSVSYMNWYQQKSGTSPKRWIYDTSKVASGVPYRFSGSGSGTSYSLTISSMEAEDAATYYCQQWSSNPLTFGAGTKLELKHHHHHH

SEQ ID NO: 2659 - protein, 523 aa, Artificial Sequence
  Synthetic Polypeptide
MALPVTALLLPLALLLHAARPDIQMTQSPSSLSASVGDRVTITCRASSSVSYMHWYQQKPGKAPKPLIYAPSNLASGVPSRFSGSGSGTDFTLTISSLQPEDFATYYCQQWSFNPPTFGQGTKVEIKRGGGGSGGGGSGGGGSEVQLVESGGGLVQPGGSLRLSCAASGYTFTSYNMHWVRQAPGKGLEWVGAIYPGNGDTSYNQKFKGRFTISVDKSKNTLYLQMNSLRAEDTAVYYCARVVYYSNSYWYFDVWGQGTLVTVSSTRTRGGGGSDIKLQQSGAELARPGASVKMSCKTSGYTFTRYTMHWVKQRPGQGLEWIGYINPSRGYTNYNQKFKDKATLTTDKSSSTAYMQLSSLTSEDSAVYYCARYYDDHYCLDYWGQGTTLTVSSVEGGSGGSGGSGGSGGVDDIQLTQSPAIMSASPGEKVTMTCRASSSVSYMNWYQQKSGTSPKRWIYDTSKVASGVPYRFSGSGSGTSYSLTISSMEAEDAATYYCQQWSSNPLTFGAGTKLELKHHHHHH

SEQ ID NO: 2660 - protein, 525 aa, Artificial Sequence
  Synthetic Polypeptide
MALPVTALLLPLALLLHAARPQIVLSQSPAILSASPGEKVTMTCRASSSVSYMHWYQQKPGSSPKPWIYATSNLASGVPARFSGSGSGTSYSFTISRVEAEDAATYYCQQWTFNPPTFGGGTRLEIKRTVAAGGGGSGGGGSGGGGSQAYLQQSGAELVRPGASVKMSCKASGYTFTSYNMHWVKQTPRQGLEWIGGIYPGNGDTSYNQKFKGKATLTVGKSSSTAYMQLSSLTSEDSAVYFCARYDYNYAMDYWGQGTSVTVSSASTRTRGGGGSDIKLQQSGAELARPGASVKMSCKTSGYTFTRYTMHWVKQRPGQGLEWIGYINPSRGYTNYNQKFKDKATLTTDKSSSTAYMQLSSLTSEDSAVYYCARYYDDHYCLDYWGQGTTLTVSSVEGGSGGSGGSGGSGGVDDIQLTQSPAIMSASPGEKVTMTCRASSSVSYMNWYQQKSGTSPKRWIYDTSKVASGVPYRFSGSGSGTSYSLTISSMEAEDAATYYCQQWSSNPLTFGAGTKLELKHHHHHH

SEQ ID NO: 2661 - protein, 523 aa, Artificial Sequence; identical to SEQ ID NO: 2659
  Synthetic Polypeptide

SEQ ID NO: 2662 - protein, 524 aa, Artificial Sequence
  Synthetic Polypeptide
MALPVTALLLPLALLLHAARPDEIVLTQSPATLSLSPGERATLSCRASQSVSSYLAWYQQKPGQAPRLLIYDASNRATGIPARFSGSGSGTDFTLTISSLEPEDFAVYYCQQRSNWPITFGQGTRLEIKGGGGSGGGGSGGGGSEVQLVESGGGLVQPDRSLRLSCAASGFTFHDYAMHWVRQAPGKGLEWVSTISWNSGTIGYADSVKGRFTISRDNAKNSLYLQMNSLRAEDTALYYCAKDIQYGNYYYGMDVWGQGTTVTVSSTRTRGGGGSDIKLQQSGAELARPGASVKMSCKTSGYTFTRYTMHWVKQRPGQGLEWIGYINPSRGYTNYNQKFKDKATLTTDKSSSTAYMQLSSLTSEDSAVYYCARYYDDHYCLDYWGQGTTLTVSSVEGGSGGSGGSGGSGGVDDIQLTQSPAIMSASPGEKVTMTCRASSSVSYMNWYQQKSGTSPKRWIYDTSKVASGVPYRFSGSGSGTSYSLTISSMEAEDAATYYCQQWSSNPLTFGAGTKLELKHHHHHH

SEQ ID NO: 2663 - protein, 527 aa, Artificial Sequence
  Synthetic Polypeptide
MALPVTALLLPLALLLHAARPDIQMTQSPSSLSASVGDRVTITCRSSQSIVHSVGNTFLEWYQQKPGKAPKLLIYKVSNRFSGVPSRFSGSGSGTDFTLTISSLQPEDFATYYCFQGSQFPYTFGQGTKVEIKRGGGGSGGGGSGGGGSEVQLVESGGGLVQPGGSLRLSCAASGYEFSRSWMNWVRQAPGKGLEWVGRIYPGDGDTNYSGKFKGRFTISADTSKNTAYLQMNSLRAEDTAVYYCARDGSSWDWYFDVWGQGTLVTVSSTRTRGGGGSDIKLQQSGAELARPGASVKMSCKTSGYTFTRYTMHWVKQRPGQGLEWIGYINPSRGYTNYNQKFKDKATLTTDKSSSTAYMQLSSLTSEDSAVYYCARYYDDHYCLDYWGQGTTLTVSSVEGGSGGSGGSGGSGGVDDIQLTQSPAIMSASPGEKVTMTCRASSSVSYMNWYQQKSGTSPKRWIYDTSKVASGVPYRFSGSGSGTSYSLTISSMEAEDAATYYCQQWSSNPLTFGAGTKLELKHHHHHH

SEQ ID NO: 2664 - protein, 519 aa, Artificial Sequence
  Synthetic Polypeptide
MALPVTALLLPLALLLHAARPDIVMTQSPSSLSASVGDRVTITCKASQSVTNDVAWYQQKPGKAPKLLIYYASNRYTGVPSRFSGSGSGTDFTLTISSLQPEDFATYYCQQDYRSPWTFGGGTKVEIKRGGGGSGGGGSGGGGSQVQLEESGGGVVRPGRSLRLSCAASGFTFSDYGVNWIRQAPGKGLEWVTIIWGDGRTDYNSALKSRFTVSRNNSNNTLSLQMNSLTTEDTAVYYCVRAPGNRAMEYWGQGVLVTVSSTRTRGGGGSDIKLQQSGAELARPGASVKMSCKTSGYTFTRYTMHWVKQRPGQGLEWIGYINPSRGYTNYNQKFKDKATLTTDKSSSTAYMQLSSLTSEDSAVYYCARYYDDHYCLDYWGQGTTLTVSSVEGGSGGSGGSGGSGGVDDIQLTQSPAIMSASPGEKVTMTCRASSSVSYMNWYQQKSGTSPKRWIYDTSKVASGVPYRFSGSGSGTSYSLTISSMEAEDAATYYCQQWSSNPLTFGAGTKLELKHHHHHH

SEQ ID NO: 2665 - protein, 525 aa, Artificial Sequence
  Synthetic Polypeptide
MALPVTALLLPLALLLHAARPQVQLQQSGPGLVKPSQTLSLTCAISGDSVSSNSAAWNWIRQSPSRGLEWLGRTYYRSKWYNDYAVSVKSRITINPDTSKNQFSLQLNSVTPEDTAVYYCAREVTGDLEDAFDIWGQGTMVTVSSGGGGSGGGGSGGGGSDIQMTQSPSSLSASVGDRVTITCRASQTIWSYLNWYQQRPGKAPNLLIYAASSLQSGVPSRFSGRGSGTDFTLTISSLQAEDFATYYCQQSYSIPQIFGQGTKLEIKTRTRGGGGSDIKLQQSGAELARPGASVKMSCKTSGYTFTRYTMHWVKQRPGQGLEWIGYINPSRGYTNYNQKFKDKATLTTDKSSSTAYMQLSSLTSEDSAVYYCARYYDDHYCLDYWGQGTTLTVSSVEGGSGGSGGSGGSGGVDDIQLTQSPAIMSASPGEKVTMTCRASSSVSYMNWYQQKSGTSPKRWIYDTSKVASGVPYRFSGSGSGTSYSLTISSMEAEDAATYYCQQWSSNPLTFGAGTKLELKHHHHHH

SEQ ID NO: 2666 - protein, 524 aa, Artificial Sequence
  Synthetic Polypeptide
MALPVTALLLPLALLLHAARPEVQLVESGGGLVQPGRSLRLSCAASGFTFDDYAMHWVRQAPGKGLEWVSGISWNSGSIGYADSVKGRFTISRDNAKNSLYLQMNSLRAEDTALYYCAKDKGGGYYDFWSGSDYWGQGTLVTVSSGGGGSGGGGSGGGGSSSELTQDPAVSVALGQTVRITCQGDSLRSYYASWYQQKPGQAPVLVIYGKNNRPSGIPDRFSGSSSGNTASLTITGAQAEDEADYYCNSRDSSGWVFGGGTKLTVLTRTRGGGGSDIKLQQSGAELARPGASVKMSCKTSGYTFTRYTMHWVKQRPGQGLEWIGYINPSRGYTNYNQKFKDKATLTTDKSSSTAYMQLSSLTSEDSAVYYCARYYDDHYCLDYWGQGTTLTVSSVEGGSGGSGGSGGSGGVDDIQLTQSPAIMSASPGEKVTMTCRASSSVSYMNWYQQKSGTSPKRWIYDTSKVASGVPYRFSGSGSGTSYSLTISSMEAEDAATYYCQQWSSNPLTFGAGTKLELKHHHHHH

SEQ ID NO: 2667 - protein, 533 aa, Artificial Sequence
  Synthetic Polypeptide
MALPVTALLLPLALLLHAARPEVQLQQSGPGLVKPSQTLSLTCAISGDSVLSNSDTWNWIRQSPSRGLEWLGRTYHRSTWYDDYASSVRGRVSINVDTSKNQYSLQLNAVTPEDTGVYYCARDRLQDGNSWSDAFDVWGQGTMVTVSSGGGGSGGGGSGGGGSQSALTQPASVSGSPGQSITISCTGTSSDVGGYNYVSWYQQHPGKAPKLMIYDVSNRPSGVSNRFSGSKSGNTASLTISGLQAEDEADYYCSSYTSSSTLVYVFGTGTKVTVLTRTRGGGGSDIKLQQSGAELARPGASVKMSCKTSGYTFTRYTMHWVKQRPGQGLEWIGYINPSRGYTNYNQKFKDKATLTTDKSSSTAYMQLSSLTSEDSAVYYCARYYDDHYCLDYWGQGTTLTVSSVEGGSGGSGGSGGSGGVDDIQLTQSPAIMSASPGEKVTMTCRASSSVSYMNWYQQKSGTSPKRWIYDTSKVASGVPYRFSGSGSGTSYSLTISSMEAEDAATYYCQQWSSNPLTFGAGTKLELKHHHHHH

SEQ ID NO: 2668 - protein, 525 aa, Artificial Sequence
  Synthetic Polypeptide
MALPVTALLLPLALLLHAARPDDIQMTQTTSSLSASLGDRVTISCRASQDISNYLNWYQQKPDGTVKLLIYYTSILHSGVPSRFSGSGSGTDYSLTISNLEQEDFATYFCQQGNTLPWTFGGGTKLEIKAGGGGSGGGGSGGGGSEVQLVESGGGLVKPGGSLKLSCAASGFAFSIYDMSWVRQTPEKRLEWVAYISSGGGTYYPDTVKGRFTISRDNAKNTLYLQMSSLKSEDTAMYYCARHSGYGTHWGVLFAYWGQGTLVTVSATRTRGGGGSDIKLQQSGAELARPGASVKMSCKTSGYTFTRYTMHWVKQRPGQGLEWIGYINPSRGYTNYNQKFKDKATLTTDKSSSTAYMQLSSLTSEDSAVYYCARYYDDHYCLDYWGQGTTLTVSSVEGGSGGSGGSGGSGGVDDIQLTQSPAIMSASPGEKVTMTCRASSSVSYMNWYQQKSGTSPKRWIYDTSKVASGVPYRFSGSGSGTSYSLTISSMEAEDAATYYCQQWSSNPLTFGAGTKLELKHHHHHH

SEQ ID NO: 2669 - protein, 518 aa, Artificial Sequence
  Synthetic Polypeptide
MALPVTALLLPLALLLHAARPDIQMTQSPATIENTSLSASVGDRVTITCRASQGISSWLTWYQQKPEKAPKSLIYAASSLQSGVPSRFSGSGSGTDFTLTISSLQPEDFATYYCQQYDSYPITFGQGTRLEIKGGGGSGGGGSGGGGSQVQLQQWGAGLLKPSETLSLTCAVYGGSFSAYYWSWIRQPPGKGLEWIGDINHGGGTNYNPSLKSRVTISVDTSKNQFSLKLNSVTAADTAVYYCASLTAYWGQGSLVTVSSTRTRGGGGSDIKLQQSGAELARPGASVKMSCKTSGYTFTRYTMHWVKQRPGQGLEWIGYINPSRGYTNYNQKFKDKATLTTDKSSSTAYMQLSSLTSEDSAVYYCARYYDDHYCLDYWGQGTTLTVSSVEGGSGGSGGSGGSGGVDDIQLTQSPAIMSASPGEKVTMTCRASSSVSYMNWYQQKSGTSPKRWIYDTSKVASGVPYRFSGSGSGTSYSLTISSMEAEDAATYYCQQWSSNPLTFGAGTKLELKHHHHHH

SEQ ID NO: 2670 - protein, 523 aa, Artificial Sequence
  Synthetic Polypeptide
MALPVTALLLPLALLLHAARPDEIVLTQSPDSLAVSLGERATINCKASQSVDFDGDSYLNWYQQKPGQPPKVLIYAASTLQSGVPSRFSGSGSGTDFTLTINSLEAEDAATYYCQQSNEDPWTFGGGTKVEIKGGGGSGGGGSGGGGSQVQLVQSGAEVKKPGASVKVSCKVSGYTFTDYYITWVRQAPGQALEWMGWIYPGSGNTKYSQKFQGRFVFSVDTSASTAYLQLSSLKAEDTAVYYCANYGNYWFAYWGQGTLVTVSSTRTRGGGGSDIKLQQSGAELARPGASVKMSCKTSGYTFTRYTMHWVKQRPGQGLEWIGYINPSRGYTNYNQKFKDKATLTTDKSSSTAYMQLSSLTSEDSAVYYCARYYDDHYCLDYWGQGTTLTVSSVEGGSGGSGGSGGSGGVDDIQLTQSPAIMSASPGEKVTMTCRASSSVSYMNWYQQKSGTSPKRWIYDTSKVASGVPYRFSGSGSGTSYSLTISSMEAEDAATYYCQQWSSNPLTFGAGTKLELKHHHHHH

SEQ ID NO: 2671 - protein, 520 aa, Artificial Sequence
  Synthetic Polypeptide
MALPVTALLLPLALLLHAARPDIQMTQSPSSLSASVGDRVTITCRASQGISSWLAWYQQKPEKAPKSLIYAASSLQSGVPSRFSGSGSGTDFTLTISSLQPEDFATYYCQQYNSYPPTFGGGTKVEIKGGGGSGGGGSGGGGSEVQLVQSGGGLVHPGGSLRLSCAGSGFAFSSSTMHWIRQAPGKGLEWISLIGSGGGIYYGDSVKGRFTISRDNAKNSLYLQMNSLRAEDMAVYYCVRGYFDWVDYFDYWGQGTLVTVSSTRTRGGGGSDIKLQQSGAELARPGASVKMSCKTSGYTFTRYTMHWVKQRPGQGLEWIGYINPSRGYTNYNQKFKDKATLTTDKSSSTAYMQLSSLTSEDSAVYYCARYYDDHYCLDYWGQGTTLTVSSVEGGSGGSGGSGGSGGVDDIQLTQSPAIMSASPGEKVTMTCRASSSVSYMNWYQQKSGTSPKRWIYDTSKVASGVPYRFSGSGSGTSYSLTISSMEAEDAATYYCQQWSSNPLTFGAGTKLELKHHHHHH

SEQ ID NO: 2672 - protein, 530 aa, Artificial Sequence
  Synthetic Polypeptide
MALPVTALLLPLALLLHAARPDDIVMTQSPDSLTVSLGERTTINCKSSQSVLDSSKNKNSLAWYQQKPGQPPKLLLSWASTRESGIPDRFSGSGSGTDFTLTIDSLQPEDSATYYCQQSAHFPITFGQGTRLEIKGGGGSGGGGSGGGGSQVQLVQSGAEVKKPGASVKVSCKASGYTFTNYGMNWVKQAPGQGLKWMGWINTYTGEPTYADDFKGRVTMTSDTSTSTAYLELHNLRSDDTAVYYCARWSWSDGYYVYFDYWGQGTTVTVSSTRTRGGGGSDIKLQQSGAELARPGASVKMSCKTSGYTFTRYTMHWVKQRPGQGLEWIGYINPSRGYTNYNQKFKDKATLTTDKSSSTAYMQLSSLTSEDSAVYYCARYYDDHYCLDYWGQGTTLTVSSVEGGSGGSGGSGGSGGVDDIQLTQSPAIMSASPGEKVTMTCRASSSVSYMNWYQQKSGTSPKRWIYDTSKVASGVPYRFSGSGSGTSYSLTISSMEAEDAATYYCQQWSSNPLTFGAGTKLELKHHHHHH

SEQ ID NO: 2673 - protein, 526 aa, Artificial Sequence
  Synthetic Polypeptide
MALPVTALLLPLALLLHAARPDEIVLTQSPGSLAVSPGERVTMSCKSSQSVFFSSSQKNYLAWYQQIPGQSPRLLIYWASTRESGVPDRFTGSGSGTDFTLTISSVQPEDLAIYYCHQYLSSRTFGQGTKLEIKRGGGGSGGGGSGGGGSQVQLQQPGAEVVKPGASVKMSCKASGYTFTSYYIHWIKQTPGQGLEWVGVIYPGNDDISYNQKFQGKATLTADKSSTTAYMQLSSLTSEDSAVYYCAREVRLRYFDVWGQGTTVTVSSTRTRGGGGSDIKLQQSGAELARPGASVKMSCKTSGYTFTRYTMHWVKQRPGQGLEWIGYINPSRGYTNYNQKFKDKATLTTDKSSSTAYMQLSSLTSEDSAVYYCARYYDDHYCLDYWGQGTTLTVSSVEGGSGGSGGSGGSGGVDDIQLTQSPAIMSASPGEKVTMTCRASSSVSYMNWYQQKSGTSPKRWIYDTSKVASGVPYRFSGSGSGTSYSLTISSMEAEDAATYYCQQWSSNPLTFGAGTKLELKHHHHHH

SEQ ID NO: 2674 - protein, 551 aa, Artificial Sequence
  Synthetic Polypeptide
MALPVTALLLPLALLLHAARPYINIYNAEPANPSEKNSPTQYAYGSGEFDIVMTQSPSSLSASLGGKVTITCKASQDINKYIAWYQHKPGKGPRLLIHYTSTLQPGIPSRFSGSGSGRDYSFSISNLEPEDIATYYCLQYDNLLTFGAGTKLELKRGGGGSGGGGSGGGGSEVKLQQSGPELVKPGTSVKVSCKASGYSFTDYNMYWVKQSHGKSLEWIGYIDPYKGGTIYNQKFKGKATLTVDKSSSTAFMHLNSLTSEDSAVYYCAREMITAYYFDYWGQGSSVTVSSLERTRTRGGGGSDIKLQQSGAELARPGASVKMSCKTSGYTFTRYTMHWVKQRPGQGLEWIGYINPSRGYTNYNQKFKDKATLTTDKSSSTAYMQLSSLTSEDSAVYYCARYYDDHYCLDYWGQGTTLTVSSVEGGSGGSGGSGGSGGVDDIQLTQSPAIMSASPGEKVTMTCRASSSVSYMNWYQQKSGTSPKRWIYDTSKVASGVPYRFSGSGSGTSYSLTISSMEAEDAATYYCQQWSSNPLTFGAGTKLELKHHHHHH

SEQ ID NO: 2675 - protein, 567 aa, Artificial Sequence
  Synthetic Polypeptide
MALPVTALLLPLALLLHAARPDIQMTQSPSSLSASVGDRVTINCKASQDINSYLSWFQQKPGKAPKTLIYRANRLVDGVPSRFSGSGSGQDYTLTISSLQPEDFATYYCLQYDEFPLTFGGGTKVEIKGGGGSGGGGSGGGGSQVQLVQSGAEVKKPGASVKVSCKASGYTFTNYDINWVRQAPGQGLEWIGWIYPGDGSTKYNEKFKAKATLTADTSTSTAYMELRSLRSDDTAVYYCASGYEDAMDYWGQGTTVTVSSAKPTTTPAPRPPTPAPTIASQPLSLRPEACRPAAGGAVHTRGLDFACDITRTRGGGGSDIKLQQSGAELARPGASVKMSCKTSGYTFTRYTMHWVKQRPGQGLEWIGYINPSRGYTNYNQKFKDKATLTTDKSSSTAYMQLSSLTSEDSAVYYCARYYDDHYCLDYWGQGTTLTVSSVEGGSGGSGGSGGSGGVDDIQLTQSPAIMSASPGEKVTMTCRASSSVSYMNWYQQKSGTSPKRWIYDTSKVASGVPYRFSGSGSGTSYSLTISSMEAEDAATYYCQQWSSNPLTFGAGTKLELKHHHHHH

SEQ ID NO: 2676 - protein, 523 aa, Artificial Sequence
  Synthetic Polypeptide
MALPVTALLLPLALLLHAARPEIVLTQSPLSLPVTPGEPASISCRSSQSLLHSNGYNYLDWYLQKPGQSPQLLIYLGVNSVSGVPDRFSGSGSGTDFTLKISRVEAEDVGVYYCMQALQTPWTFGQGTKVEIKGGGGSGGGGSGGGGSQVQLVQSGAEVKKPGSSVKVSCKASGGIFSNHAISWVRQAPGQGLEWMGGIIPIFGTANYAQKFQGRVTITADESTSTAFMELSSLRSEDTAVYYCAREWADVFDIWGQGTMVTVSSTRTRGGGGSDIKLQQSGAELARPGASVKMSCKTSGYTFTRYTMHWVKQRPGQGLEWIGYINPSRGYTNYNQKFKDKATLTTDKSSSTAYMQLSSLTSEDSAVYYCARYYDDHYCLDYWGQGTTLTVSSVEGGSGGSGGSGGSGGVDDIQLTQSPAIMSASPGEKVTMTCRASSSVSYMNWYQQKSGTSPKRWIYDTSKVASGVPYRFSGSGSGTSYSLTISSMEAEDAATYYCQQWSSNPLTFGAGTKLELKHHHHHH

SEQ ID NO: 2677 - protein, 522 aa, Artificial Sequence
  Synthetic Polypeptide
MALPVTALLLPLALLLHAARPDIQMTQSPASLTVSLGQRATISCRASESVDSYGNSYLHWYQQKPGQPPQLLIYLASNLESGVPARFSGSGSRTDFTLTIDPVEADDAATYYCQQNNEDPWTFGGGTKVEIKGGGGSGGGGSGGGGSEVQLQQSGAELVKPGASVKMSCKAFGYTFTTFPIEWMKQSHGKSLEWIGNFHPYNDQTKYNEEFKGRAKLTIDRSSSTVYLELGRLTSDDSAVYYCARGYYYAFDFWGQGTTLTVSSTRTRGGGGSDIKLQQSGAELARPGASVKMSCKTSGYTFTRYTMHWVKQRPGQGLEWIGYINPSRGYTNYNQKFKDKATLTTDKSSSTAYMQLSSLTSEDSAVYYCARYYDDHYCLDYWGQGTTLTVSSVEGGSGGSGGSGGSGGVDDIQLTQSPAIMSASPGEKVTMTCRASSSVSYMNWYQQKSGTSPKRWIYDTSKVASGVPYRFSGSGSGTSYSLTISSMEAEDAATYYCQQWSSNPLTFGAGTKLELKHHHHHH

SEQ ID NO: 2678 - protein, 528 aa, Artificial Sequence
  Synthetic Polypeptide
MALPVTALLLPLALLLHAARPDIVMTQSPDSLAVSLGERATINCESSQSLLNSGNQKNYLTWYQQKPGQPPKPLIYWASTRESGVPDRFSGSGSGTDFTLTISSLQAEDVAVYYCQNDYSYPYTFGQGTKLEIKRGGGGSGGGGSGGGGSEVQLVQSGAEVKKPGESLKISCKGSGYSFTDYYMKWARQMPGKGLEWMGDIIPSNGATFYNQKFKGQVTISADKSISTTYLQWSSLKASDTAMYYCARSHLLRASWFAYWGQGTMVTVSSTRTRGGGGSDIKLQQSGAELARPGASVKMSCKTSGYTFTRYTMHWVKQRPGQGLEWIGYINPSRGYTNYNQKFKDKATLTTDKSSSTAYMQLSSLTSEDSAVYYCARYYDDHYCLDYWGQGTTLTVSSVEGGSGGSGGSGGSGGVDDIQLTQSPAIMSASPGEKVTMTCRASSSVSYMNWYQQKSGTSPKRWIYDTSKVASGVPYRFSGSGSGTSYSLTISSMEAEDAATYYCQQWSSNPLTFGAGTKLELKHHHHHH

SEQ ID NO: 2679 - protein, 523 aa, Artificial Sequence
  Synthetic Polypeptide
MALPVTALLLPLALLLHAARPDIVLTQSPASLAVSLGQRATISCRASESVDNYGNTFMHWYQQKPGQPPKLLIYRASNLESGIPARFSGSGSRTDFTLTINPVEADDVATYYCQQSNEDPPTFGAGTKLELKGGGGSGGGGSGGGGSQIQLVQSGPELKKPGETVKISCKASGYIFTNYGMNWVKQAPGKSFKWMGWINTYTGESTYSADFKGRFAFSLETSASTAYLHINDLKNEDTATYFCARSGGYDPMDYWGQGTSVTVSSTRTRGGGGSDIKLQQSGAELARPGASVKMSCKTSGYTFTRYTMHWVKQRPGQGLEWIGYINPSRGYTNYNQKFKDKATLTTDKSSSTAYMQLSSLTSEDSAVYYCARYYDDHYCLDYWGQGTTLTVSSVEGGSGGSGGSGGSGGVDDIQLTQSPAIMSASPGEKVTMTCRASSSVSYMNWYQQKSGTSPKRWIYDTSKVASGVPYRFSGSGSGTSYSLTISSMEAEDAATYYCQQWSSNPLTFGAGTKLELKHHHHHH

SEQ ID NO: 2680 - protein, 527 aa, Artificial Sequence
  Synthetic Polypeptide
MALPVTALLLPLALLLHAARPDFVMTQSPDSLAVSLGERVTMSCKSSQSLLNSGNQKNYLTWYQQKPGQPPKLLIYWASTRESGVPDRFSGSGSGTDFTLTISSLQAEDVAVYYCQNDYSYPYTFGQGTKLEIKGGGGSGGGGSGGGGSEVQLVQSGAELKKPGASVKVSCKASGYTFTDYYMKWVRQAPGQGLEWIGDIIPSNGATFYNQKFKGRVTITVDKSTSTAYMELSSLRSEDTAVYYCARSHLLRASWFAYWGQGTLVTVSSTRTRGGGGSDIKLQQSGAELARPGASVKMSCKTSGYTFTRYTMHWVKQRPGQGLEWIGYINPSRGYTNYNQKFKDKATLTTDKSSSTAYMQLSSLTSEDSAVYYCARYYDDHYCLDYWGQGTTLTVSSVEGGSGGSGGSGGSGGVDDIQLTQSPAIMSASPGEKVTMTCRASSSVSYMNWYQQKSGTSPKRWIYDTSKVASGVPYRFSGSGSGTSYSLTISSMEAEDAATYYCQQWSSNPLTFGAGTKLELKHHHHHH

SEQ ID NO: 2681 - protein, 527 aa, Artificial Sequence
  Synthetic Polypeptide
MALPVTALLLPLALLLHAARPDFVMTQSPDSLAVSLGERVTMSCKSSQSLLNSGNQKNYLTWYQQKPGQPPKLLIYWASTRESGVPDRFSGSGSGTDFTLTISSLQAEDVAVYYCQNDYSYPYTFGQGTKLEIKGGGGSGGGGSGGGGSQVQLVQSGAELKKPGASVKVSCKASGYTFTDYYMKWVRQAPGQGLEWIGDIIPSNGATFYNQKFKGRVTITVDKSTSTAYMELSSLRSEDTAVYYCARSHLLRASWFAYWGQGTLVTVSSTRTRGGGGSDIKLQQSGAELARPGASVKMSCKTSGYTFTRYTMHWVKQRPGQGLEWIGYINPSRGYTNYNQKFKDKATLTTDKSSSTAYMQLSSLTSEDSAVYYCARYYDDHYCLDYWGQGTTLTVSSVEGGSGGSGGSGGSGGVDDIQLTQSPAIMSASPGEKVTMTCRASSSVSYMNWYQQKSGTSPKRWIYDTSKVASGVPYRFSGSGSGTSYSLTISSMEAEDAATYYCQQWSSNPLTFGAGTKLELKHHHHHH

SEQ ID NO: 2682 - protein, 528 aa, Artificial Sequence
  Synthetic Polypeptide
MALPVTALLLPLALLLHAARPDIVMTQSPSSLAVSEGETVTINCKSSQSFLSSGDGKNYVAWYQYKPGQSPKLLIYWASTRQSGVPDRFIGSGSGTDFTLTISTVQAEDLAIYYCQQYYDTPLTFGSGTKLEIKGGGGSGGGGSGGGGSEVKLQESGPSLVQSSQTLSLTCTVSGFSLTSYHIHWVRQTPGKGLEWMGVMWSDGDTSYNSALKSRLSISRDTSQSQVFLKMNSLQTEDTATYYCARGYYSSYLYLWFAYWGQGTLVTVSSTRTRGGGGSDIKLQQSGAELARPGASVKMSCKTSGYTFTRYTMHWVKQRPGQGLEWIGYINPSRGYTNYNQKFKDKATLTTDKSSSTAYMQLSSLTSEDSAVYYCARYYDDHYCLDYWGQGTTLTVSSVEGGSGGSGGSGGSGGVDDIQLTQSPAIMSASPGEKVTMTCRASSSVSYMNWYQQKSGTSPKRWIYDTSKVASGVPYRFSGSGSGTSYSLTISSMEAEDAATYYCQQWSSNPLTFGAGTKLELKHHHHHH

SEQ ID NO: 2683 - protein, 532 aa, Artificial Sequence
  Synthetic Polypeptide
MALPVTALLLPLALLLHAARPDVLMTQTPVSLPVSLGGQVSISCRSSQSLVHSDGDTYLHWYLQKPGQSPQLLIYRVSNRFSGVPDRFSGSGSGTDFTLKISRVEPEDLGLYYCLQTTHFPPWTFGGGTKLEMKGGGGSGGGGSGGGGSQVQLQQSGPELRRPGSSVRLSCKASGYRIKDFLIHWIKNRPEHGLEWIGWIDPEDGETKYAQKFQTKATLTADTSSNTAYMQLSSLTSEDTATYFCARWGDVYYGLMRGHVMDAWGQGTSVTVSSTRTRGGGGSDIKLQQSGAELARPGASVKMSCKTSGYTFTRYTMHWVKQRPGQGLEWIGYINPSRGYTNYNQKFKDKATLTTDKSSSTAYMQLSSLTSEDSAVYYCARYYDDHYCLDYWGQGTTLTVSSVEGGSGGSGGSGGSGGVDDIQLTQSPAIMSASPGEKVTMTCRASSSVSYMNWYQQKSGTSPKRWIYDTSKVASGVPYRFSGSGSGTSYSLTISSMEAEDAATYYCQQWSSNPLTFGAGTKLELKHHHHHH

SEQ ID NO: 2684 - protein, 523 aa, Artificial Sequence
  Synthetic Polypeptide
MALPVTALLLPLALLLHAARPDIQMTQSTSSLSASLGDRVTISCSASQGINNYLNWYQQKPDGTVELLIYYTSTLQSGVPSRFSGSGSGTDYSLTISNLEPEDIGTYYCQQYSKLPRTFGGGTKLEIKGGGGSGGGGSGGGGSQVQLQQSGSELMMPGASVKISCKATGYTFSNYWIEWVKQRPGHGLEWIGEILPGTGRTIYNEKFKGKATFTADISSNTVQMQLSSLTSEDSAVYYCARRDYYGNFYYAMDYWGQGTSVTVSSTRTRGGGGSDIKLQQSGAELARPGASVKMSCKTSGYTFTRYTMHWVKQRPGQGLEWIGYINPSRGYTNYNQKFKDKATLTTDKSSSTAYMQLSSLTSEDSAVYYCARYYDDHYCLDYWGQGTTLTVSSVEGGSGGSGGSGGSGGVDDIQLTQSPAIMSASPGEKVTMTCRASSSVSYMNWYQQKSGTSPKRWIYDTSKVASGVPYRFSGSGSGTSYSLTISSMEAEDAATYYCQQWSSNPLTFGAGTKLELKHHHHHH

SEQ ID NO: 2685 - protein, 520 aa, Artificial Sequence
  Synthetic Polypeptide
MALPVTALLLPLALLLHAARPDIQMTQSPSSLSASVGDRVTITCKASQDVGIAVAWYQQKPGKVPKLLIYWASTRHTGVPDRFSGSGSGTDFTLTISSLQPEDVATYYCQQYSSYPYTFGQGTKVEIKGGGGSGGGGSGGGGSEVQLVESGGGLVQPGGSLRLSCAASGFDFSRYWMSWVRQAPGKGLEWIGEINPDSSTINYAPSLKDKFIISRDNAKNSLYLQMNSLRAEDTAVYYCARPDGNYWYFDVWGQGTLVTVSSTRTRGGGGSDIKLQQSGAELARPGASVKMSCKTSGYTFTRYTMHWVKQRPGQGLEWIGYINPSRGYTNYNQKFKDKATLTTDKSSSTAYMQLSSLTSEDSAVYYCARYYDDHYCLDYWGQGTTLTVSSVEGGSGGSGGSGGSGGVDDIQLTQSPAIMSASPGEKVTMTCRASSSVSYMNWYQQKSGTSPKRWIYDTSKVASGVPYRFSGSGSGTSYSLTISSMEAEDAATYYCQQWSSNPLTFGAGTKLELKHHHHHH

SEQ ID NO: 2686 - protein, 521 aa, Artificial Sequence
  Synthetic Polypeptide
MALPVTALLLPLALLLHAARPDIVMTQSQKSMSTSVGDRVSITCKASQDVITGVAWYQQKPGQSPKLLIYSASYRYTGVPDRFTGSGSGTDFTFTISNVQAEDLAVYYCQQHYSTPLTFGAGTKLELKGGGGSGGGGSGGGGSQVQLQQPGAELVRPGASVKLSCKASGYSFTTYWMNWVKQRPGQGLEWIGMIHPSDSETRLNQKFKDKATLTVDKSSSTAYMQLSSPTSEDSAVYYCARSTMIATRAMDYWGQGTSVTVSSTRTRGGGGSDIKLQQSGAELARPGASVKMSCKTSGYTFTRYTMHWVKQRPGQGLEWIGYINPSRGYTNYNQKFKDKATLTTDKSSSTAYMQLSSLTSEDSAVYYCARYYDDHYCLDYWGQGTTLTVSSVEGGSGGSGGSGGSGGVDDIQLTQSPAIMSASPGEKVTMTCRASSSVSYMNWYQQKSGTSPKRWIYDTSKVASGVPYRFSGSGSGTSYSLTISSMEAEDAATYYCQQWSSNPLTFGAGTKLELKHHHHHH

SEQ ID NO: 2687 - protein, 526 aa, Artificial Sequence
  Synthetic Polypeptide
MALPVTALLLPLALLLHAARPDDIQMTQSPSSLSASVGDRVTITCRASQSISSYLNWYQQKPGKAPKLLIYAASSLQSGVPSRFSGSGSGTDFTLTISSLQPEDLATYYCQQSYSTPFTFGPGTKVDIKGGGGSGGGGSGGGGSVHEVQLVQSGAEVKKPGSSVKVSCKASGGTFSSYAISWVRQAPGQGLEWMGGIIPIFGTANYAQKFQGRVTITADKSTSTAYMELSSLRSEDTAVYYCATFALFGFREQAFDIWGQGTTVTVSSTRTRGGGGSDIKLQQSGAELARPGASVKMSCKTSGYTFTRYTMHWVKQRPGQGLEWIGYINPSRGYTNYNQKFKDKATLTTDKSSSTAYMQLSSLTSEDSAVYYCARYYDDHYCLDYWGQGTTLTVSSVEGGSGGSGGSGGSGGVDDIQLTQSPAIMSASPGEKVTMTCRASSSVSYMNWYQQKSGTSPKRWIYDTSKVASGVPYRFSGSGSGTSYSLTISSMEAEDAATYYCQQWSSNPLTFGAGTKLELKHHHHHH

SEQ ID NO: 2688 - protein, 521 aa, Artificial Sequence
  Synthetic Polypeptide
MALPVTALLLPLALLLHAARPDQIVLTQSPAIMSASPGEKVTISCSASSSVSYMYWYQQKPGSSPKPWIYRTSNLASGVPARFSGSGSGTSYSLTISNMEAEDAAAYYCQQYHSYPTTFGGGTKLEVKGGGGSGGGGSGGGGSEVQLVESGGGLVQPKGSLKLSCAASGFSFNTYAMNWVRQAPGKGLEWIAHIRSKSNNFATYYADSVKDRFSISRDASENILFLQMNNLKTEDTAMYYCVRQGGDFPMDYWGQGTSVTVSSTRTRGGGGSDIKLQQSGAELARPGASVKMSCKTSGYTFTRYTMHWVKQRPGQGLEWIGYINPSRGYTNYNQKFKDKATLTTDKSSSTAYMQLSSLTSEDSAVYYCARYYDDHYCLDYWGQGTTLTVSSVEGGSGGSGGSGGSGGVDDIQLTQSPAIMSASPGEKVTMTCRASSSVSYMNWYQQKSGTSPKRWIYDTSKVASGVPYRFSGSGSGTSYSLTISSMEAEDAATYYCQQWSSNPLTFGAGTKLELKHHHHHH

SEQ ID NO: 2689 - protein, 520 aa, Artificial Sequence
  Synthetic Polypeptide
MALPVTALLLPLALLLHAARPDDIQMTQSSSSFSVSLGDRVTITCMASEDIYIRLAWYQQKPGNAPRLLISAATSLETGVPSRFSGSGSGKDYTLSITSLQTEDVGTYYCQQYWSSPWTFGGGTKLEINGGGGSGGGGSGGGGSDVQLQESGPGLVKPSQSLSLTCTVTGYSITSDYTWNWIRQFPGNKLEWMGYITYSGSTSYNPSLKSRNSITRDTSKNQFFLQLNSVTTEDTATYYCARLGRRYTMDYWGQGTSVTVSSTRTRGGGGSDIKLQQSGAELARPGASVKMSCKTSGYTFTRYTMHWVKQRPGQGLEWIGYINPSRGYTNYNQKFKDKATLTTDKSSSTAYMQLSSLTSEDSAVYYCARYYDDHYCLDYWGQGTTLTVSSVEGGSGGSGGSGGSGGVDDIQLTQSPAIMSASPGEKVTMTCRASSSVSYMNWYQQKSGTSPKRWIYDTSKVASGVPYRFSGSGSGTSYSLTISSMEAEDAATYYCQQWSSNPLTFGAGTKLELKHHHHHH

SEQ ID NO: 2690 - protein, 520 aa, Artificial Sequence
  Synthetic Polypeptide
MALPVTALLLPLALLLHAARPDIQMTQSSSSFSVSLGDRVTITCKASEDIYIRLAWYQQKPGNAPRLLISAATSLETGIPSRFSGSGSGEDYTLTITSLQTEDVATYYCQQYWTTPWTFGGGTKLEIKRGGGGSGGGGSGGGGSDVQLQESGPGLVKPSQSLSLTCTVTGYSITIDYTWNWIRQFPGNKLEWMGYITYSGSTDYNPSLKSRSSITRDTSMNQFFLQLNSVTTEDTATYYCARLGRRYALDYWGQGTSVTVSSTRTRGGGGSDIKLQQSGAELARPGASVKMSCKTSGYTFTRYTMHWVKQRPGQGLEWIGYINPSRGYTNYNQKFKDKATLTTDKSSSTAYMQLSSLTSEDSAVYYCARYYDDHYCLDYWGQGTTLTVSSVEGGSGGSGGSGGSGGVDDIQLTQSPAIMSASPGEKVTMTCRASSSVSYMNWYQQKSGTSPKRWIYDTSKVASGVPYRFSGSGSGTSYSLTISSMEAEDAATYYCQQWSSNPLTFGAGTKLELKHHHHHH

SEQ ID NO: 2691 - protein, 519 aa, Artificial Sequence
  Synthetic Polypeptide
MALPVTALLLPLALLLHAARPDVVMTQSPSSLSASVGDRVTITCMASEDIYIRLAWYQQKPGNAPKLLIYAATSLETGVPSRFSGSGSGTDFTLTISSLQPEDFATYYCQQYWSSPWTFGGGTKVEIKGGGGSGGGGSGGGGSQVQLQESGPGLVKPSQTLSLTCTVSGYSITSDYTWNWIRQPPGNGLEWIGYITYSGSTSYNPSLKSRVLISVDTSKNQVSLKLSSVTAADTAVYYCARLGRRYTMDYWGQGTTVTVSSTRTRGGGGSDIKLQQSGAELARPGASVKMSCKTSGYTFTRYTMHWVKQRPGQGLEWIGYINPSRGYTNYNQKFKDKATLTTDKSSSTAYMQLSSLTSEDSAVYYCARYYDDHYCLDYWGQGTTLTVSSVEGGSGGSGGSGGSGGVDDIQLTQSPAIMSASPGEKVTMTCRASSSVSYMNWYQQKSGTSPKRWIYDTSKVASGVPYRFSGSGSGTSYSLTISSMEAEDAATYYCQQWSSNPLTFGAGTKLELKHHHHHH

SEQ ID NO: 2692 - protein, 523 aa, Artificial Sequence
  Synthetic Polypeptide
MALPVTALLLPLALLLHAARPEIVLTQSPATLSLSPGERATLSCSASSSVSYMYWYQQKPGQAPRLLIYRTSNLASGIPARFSGSGSGTDFTLTISSLEPEDFAVYYCQQYHSYPTTFGQGTKVEIKRTVGGGGSGGGGSGGGGSEVQLVESGGGLVQPGGSLRLSCAASGFSFNTYAMNWVRQAPGKGLEWVSHIRSKSNNFATYYADSVKDRFTISRDNAKNSLYLQMNSLRAEDTAVYYCARQGGDFPMDYWGQGTLVTVSSTRTRGGGGSDIKLQQSGAELARPGASVKMSCKTSGYTFTRYTMHWVKQRPGQGLEWIGYINPSRGYTNYNQKFKDKATLTTDKSSSTAYMQLSSLTSEDSAVYYCARYYDDHYCLDYWGQGTTLTVSSVEGGSGGSGGSGGSGGVDDIQLTQSPAIMSASPGEKVTMTCRASSSVSYMNWYQQKSGTSPKRWIYDTSKVASGVPYRFSGSGSGTSYSLTISSMEAEDAATYYCQQWSSNPLTFGAGTKLELKHHHHHH

SEQ ID NO: 2693 - protein, 519 aa, Artificial Sequence
  Synthetic Polypeptide
MALPVTALLLPLALLLHAARPDVVMTQSPSSLSASVGDRVTITCKASEDIYIRLAWYQQKPGKAPKLLIYAATSLETGVPSRFSGSGSGTDFTLTISSLQPEDFATYYCQQYWTTPWTFGGGTKVEIKGGGGSGGGGSGGGGSQVQLQESGPGLVKPSQTLSLTCTVSGYSITIDYTWNWIRQPPGKGLEWIGYITYSGSTDYNPSLKSRVLISVDTSKNQVSLKLSSVTAADTAVYYCARLGRRYALDYWGQGTTVTVSSTRTRGGGGSDIKLQQSGAELARPGASVKMSCKTSGYTFTRYTMHWVKQRPGQGLEWIGYINPSRGYTNYNQKFKDKATLTTDKSSSTAYMQLSSLTSEDSAVYYCARYYDDHYCLDYWGQGTTLTVSSVEGGSGGSGGSGGSGGVDDIQLTQSPAIMSASPGEKVTMTCRASSSVSYMNWYQQKSGTSPKRWIYDTSKVASGVPYRFSGSGSGTSYSLTISSMEAEDAATYYCQQWSSNPLTFGAGTKLELKHHHHHH

SEQ ID NO: 2694 - protein, 520 aa, Artificial Sequence
  Synthetic Polypeptide
MALPVTALLLPLALLLHAARPDIQMTQSPASLSASVGETVTIICRASVNIYSYLAWYQQKQGKSPQLLVYNAKILAEGVPSRFSGSGSGTQFSLKINSLQPEDFGSYYCQHHYGTFTFGSGTKLEIKRGGGGSGGGGSGGGGSQVQLKESGPGLVAPSQSLSITCTISGFSLTSYGVHWVRQPPGKGLEWLVVIWSDGSTTYNSALKSRLSISKDNSKSQVFLKMNSLQTDDTAIYYCASHYGSTLAFASWGHGTLVTVSAATRTRGGGGSDIKLQQSGAELARPGASVKMSCKTSGYTFTRYTMHWVKQRPGQGLEWIGYINPSRGYTNYNQKFKDKATLTTDKSSSTAYMQLSSLTSEDSAVYYCARYYDDHYCLDYWGQGTTLTVSSVEGGSGGSGGSGGSGGVDDIQLTQSPAIMSASPGEKVTMTCRASSSVSYMNWYQQKSGTSPKRWIYDTSKVASGVPYRFSGSGSGTSYSLTISSMEAEDAATYYCQQWSSNPLTFGAGTKLELKHHHHHH

SEQ ID NO: 2695 - protein, 528 aa, Artificial Sequence
  Synthetic Polypeptide
MALPVTALLLPLALLLHAARPDIVMTQSHKFMSTSVGDRVSVTCKASQNVGNNVAWYQQKPGQSPKVLIYSASYRYSGVPDRFTGSGSGTDFTLTISNVQSEDLAEYFCQQYNTYPFTFGSGTKLEIKGGGGSGGGGSGGGGSEVQLEESGGGLVQPGGSMKLSCVASGFTFSNYWMNWVRQSPEKGLEWVAEIRFKSHNYATHFAESVKGRFTISRDDSKSSVYLQMNNLRAEDTGIYYCTRRIGNSDYDWWYFDVWGAGTSVTVSSASTRTRGGGGSDIKLQQSGAELARPGASVKMSCKTSGYTFTRYTMHWVKQRPGQGLEWIGYINPSRGYTNYNQKFKDKATLTTDKSSSTAYMQLSSLTSEDSAVYYCARYYDDHYCLDYWGQGTTLTVSSVEGGSGGSGGSGGSGGVDDIQLTQSPAIMSASPGEKVTMTCRASSSVSYMNWYQQKSGTSPKRWIYDTSKVASGVPYRFSGSGSGTSYSLTISSMEAEDAATYYCQQWSSNPLTFGAGTKLELKHHHHHH

SEQ ID NO: 2696 - protein, 524 aa, Artificial Sequence
  Synthetic Polypeptide
MALPVTALLLPLALLLHAARPDIVMTQSPDSLAVSLGERATINCRASKSVSTSGYSFMHWYQQKPGQPPKLLIYLASNLESGVPDRFSGSGSGTDFTLTISSLQAEDVAVYYCQHSREVPWTFGQGTKVEIKRGGGGSGGGGSGGGGSQVQLVQSGAEVKKPGASVKVSCKASGYTFTNYGMNWVRQAPGQGLEWMGWINTYTGEPTYADAFKGRFAFSLDTSTSTAYLQINSLRSDDTAVYYCARDYGDYGMDYWGQGTTVTVSSTRTRGGGGSDIKLQQSGAELARPGASVKMSCKTSGYTFTRYTMHWVKQRPGQGLEWIGYINPSRGYTNYNQKFKDKATLTTDKSSSTAYMQLSSLTSEDSAVYYCARYYDDHYCLDYWGQGTTLTVSSVEGGSGGSGGSGGSGGVDDIQLTQSPAIMSASPGEKVTMTCRASSSVSYMNWYQQKSGTSPKRWIYDTSKVASGVPYRFSGSGSGTSYSLTISSMEAEDAATYYCQQWSSNPLTFGAGTKLELKHHHHHH

SEQ ID NO: 2697 - protein, 520 aa, Artificial Sequence
  Synthetic Polypeptide
MALPVTALLLPLALLLHAARPDIVMTQTPLTLSVTIGQPASISCKSSQSLLDSDGKTYLNWLLQRPGQSPERLIYLVSKLDSGVPDRFTGSGSGTDFTLKISRVEAEDLGVYCCWQGTHFPYTFGGGTKVEIKGGGGGSGGGGSGGGGSQVQLQQPGAELVRPGASVKLSCKASGYTFTSYWMNWVKQRPGQGLEWIGMIDPSDSETHYNHIFKDKATLTVDKSSSTAYLQLSSLTSEDSAVYYCARNLYLWGQGTSVTVSSTRTRGGGGSDIKLQQSGAELARPGASVKMSCKTSGYTFTRYTMHWVKQRPGQGLEWIGYINPSRGYTNYNQKFKDKATLTTDKSSSTAYMQLSSLTSEDSAVYYCARYYDDHYCLDYWGQGTTLTVSSVEGGSGGSGGSGGSGGVDDIQLTQSPAIMSASPGEKVTMTCRASSSVSYMNWYQQKSGTSPKRWIYDTSKVASGVPYRFSGSGSGTSYSLTISSMEAEDAATYYCQQWSSNPLTFGAGTKLELKHHHHHH

SEQ ID NO: 2698 - protein, 518 aa, Artificial Sequence
  Synthetic Polypeptide
MALPVTALLLPLALLLHAARPDIQMTQSPASLSVSVGETVTITCRASENIYSNLAWYQQKQGKSPQLLVYAATNLADGVPSRFSGSGSGTQYSLKINSLQSEDFGSYYCQHFWGTWTFGGGTTLEIKGGGGSGGGGSGGGGSEVQLQQSGPELVKPGASVKMSCKASGYTFTDYYMKWMKQSHGKSLEWIGDINPNNGGTTYNQKFKGKATLTVDKSSSTAYMQLNSLTSEDSAVYYCARDYGYGYFDYWGQGTTLTVSSTRTRGGGGSDIKLQQSGAELARPGASVKMSCKTSGYTFTRYTMHWVKQRPGQGLEWIGYINPSRGYTNYNQKFKDKATLTTDKSSSTAYMQLSSLTSEDSAVYYCARYYDDHYCLDYWGQGTTLTVSSVEGGSGGSGGSGGSGGVDDIQLTQSPAIMSASPGEKVTMTCRASSSVSYMNWYQQKSGTSPKRWIYDTSKVASGVPYRFSGSGSGTSYSLTISSMEAEDAATYYCQQWSSNPLTFGAGTKLELKHHHHHH

SEQ ID NO: 2699 - protein, 522 aa, Artificial Sequence
  Synthetic Polypeptide
MALPVTALLLPLALLLHAARPQSVLTQPPSASGTPGQRVTISCSGSRSNVGGNYVFWYQQVPGATPKLLIYRSNQRPSGVPDRFAGSKSGSSASLAISGLRSEDEADYYCATWDDSLSGFVFGTGTKVTVLGGGGGSGGGGSGGGGSEVQLVESGGGLVKPGGSLRLSCAASGFTFSDYYMSWIRQAPGKGLEWVSYISSSGSTIYYADSVKGRFTISRDNAKNSLYLQMNSLRAEDTAVYYCARGYGKAYDQWGQGTLVTVSSTRTRGGGGSDIKLQQSGAELARPGASVKMSCKTSGYTFTRYTMHWVKQRPGQGLEWIGYINPSRGYTNYNQKFKDKATLTTDKSSSTAYMQLSSLTSEDSAVYYCARYYDDHYCLDYWGQGTTLTVSSVEGGSGGSGGSGGSGGVDDIQLTQSPAIMSASPGEKVTMTCRASSSVSYMNWYQQKSGTSPKRWIYDTSKVASGVPYRFSGSGSGTSYSLTISSMEAEDAATYYCQQWSSNPLTFGAGTKLELKHHHHHH

SEQ ID NO: 2700 - protein, 521 aa, Artificial Sequence
  Synthetic Polypeptide
MALPVTALLLPLALLLHAARPQSVVTQPPSMSAAPGQQVTISCSGGNSNIERNYVSWYLQLPGTAPKLVIFDNDRRPSGIPDRFSGSKSGTSATLGITGLQTGDEADYYCGTWDSSLRGWVFGGGTKLTVLGGGGGSGGGGSGGGGSEVQLVESGGGLIQPGGSLRLSCAASGFTFSNYAMNWVRQAPGKGLEWVSTINGRGSSTIYADSVKGRFTISRDNSKNTLYLQMNSLRAEDTATYYCARYISRGLGDSWGQGTLVTVTRTRGGGGSDIKLQQSGAELARPGASVKMSCKTSGYTFTRYTMHWVKQRPGQGLEWIGYINPSRGYTNYNQKFKDKATLTTDKSSSTAYMQLSSLTSEDSAVYYCARYYDDHYCLDYWGQGTTLTVSSVEGGSGGSGGSGGSGGVDDIQLTQSPAIMSASPGEKVTMTCRASSSVSYMNWYQQKSGTSPKRWIYDTSKVASGVPYRFSGSGSGTSYSLTISSMEAEDAATYYCQQWSSNPLTFGAGTKLELKHHHHHH

SEQ ID NO: 2701 - protein, 575 aa, Artificial Sequence
  Synthetic Polypeptide
MALPVTALLLPLALLLHAARPDIVLTQSPLSLAVSLGQPAIISCKASQSVSFAGTSLMHWYHQKPGQQPRLLIYRASNLEAGVPDRFSGSGSKTDFTLTISPVEAEDAATYYCQQSREYPYTFGGGTKLEIKRGGGGSGGGGSGGGGSQVQLVQSGAEVVKPGASVKISCKASGYTFTGYFMNWVKQSPGQSLEWIGRIHPYDGDTFYNQKFQGKATLTVDKSSNTAHMELLSLTSEDFAVYYCTRYDGSRAMDYWGQGTTVTVSSTRTRGSAWSHPQFEKGGGSGGGSGGSAWSHPQFEKSRSSGGGGSQVQLVQSGGGVVQPGRSLRLSCKSSGYTFTRYTMHWVRQAPGKGLEWIGYINPSRGYTNYNQKVKDRFTISRDNSKNTAFLQMDSLRPEDTGVYFCARYYDDHYCLDYWGQGTPVTVSSVEGGSGGSGGSGGSGGVDDIQMTQSPSSLSASVGDRVTITCRASSSVSYMNWYQQTPGKAPKRWIYDTSKVASGVPSRFSGSGSGTDYTFTISSLQPEDIATYYCQQWSSNPLTFGQGTKLQITEQKLISEEDLSGGSHHHHHHLE

SEQ ID NO: 2702 - protein, 520 aa, Artificial Sequence
  Synthetic Polypeptide
MALPVTALLLPLALLLHAARPDIQMTQTTSSLSASLGDRVTISCRASQDISKYLNWYQQKPDGTVKLLIYHTSRLHSGVPSRFSGSGSGTDYSLTISNLEQEDIATYFCQQGNTLPYTFGGGTKLEITGGGGSGGGGSGGGGSEVKLQESGPGLVAPSQSLSVTCTVSGVSLPDYGVSWIRQPPRKGLEWLGVIWGSETTYYNSALKSRLTIIKDNSKSQVFLKMNSLQTDDTAIYYCAKHYYYGGSYAMDYWGQGTSVTVSSRVTRGGGGSQVQLVQSGAEVKKPGASVKVSCKASGYTFTSYYIHWVRQAPGQGLEWIGCIYPGNVNTNYNEKFKDRATLTVDTSISTAYMELSRLRSDDTAVYFCTRSHYGLDWNFDVWGQGTTVTVSSGGGGSGGGGSGGGGSDIQMTQSPSSLSASVGDRVTITCHASQNIYVWLNWYQQKPGKAPKLLIYKASNLHTGVPSRFSGSGSGTDFTLTISSLQPEDFATYYCQQGQTYPYTFGGGTKVEIKHHHHHH

SEQ ID NO: 2703 - protein, 520 aa, Artificial Sequence
  Synthetic Polypeptide
MALPVTALLLPLALLLHAARPEIVMTQSPATLSLSPGERATLSCRASQDISKYLNWYQQKPGQAPRLLIYHTSRLHSGIPARFSGSGSGTDYTLTISSLQPEDFAVYFCQQGNTLPYTFGQGTKLEIKGGGGSGGGGSGGGGSQVQLQESGPGLVKPSETLSLTCTVSGVSLPDYGVSWIRQPPGKGLEWIGVIWGSETTYYNSSLKSRVTISKDNSKNQVSLKLSSVTAADTAVYYCAKHYYYGGSYAMDYWGQGTLVTVSSTRTRGGGGSQVQLVQSGAEVKKPGASVKVSCKASGYTFTSYYIHWVRQAPGQGLEWIGCIYPGNVNTNYNEKFKDRATLTVDTSISTAYMELSRLRSDDTAVYFCTRSHYGLDWNFDVWGQGTTVTVSSGGGGSGGGGSGGGGSDIQMTQSPSSLSASVGDRVTITCHASQNIYVWLNWYQQKPGKAPKLLIYKASNLHTGVPSRFSGSGSGTDFTLTISSLQPEDFATYYCQQGQTYPYTFGGGTKVEIKHHHHHH

SEQ ID NO: 2704 - protein, 520 aa, Artificial Sequence
  Synthetic Polypeptide
MALPVTALLLPLALLLHAARPEIVMTQSPATLSLSPGERATLSCRASQDISKYLNWYQQKPGQAPRLLIYHTSRLHSGIPARFSGSGSGTDYTLTISSLQPEDFAVYFCQQGNTLPYTFGQGTKLEIKGGGGSGGGGSGGGGSQVQLQESGPGLVKPSETLSLTCTVSGVSLPDYGVSWIRQPPGKGLEWIGVIWGSETTYYQSSLKSRVTISKDNSKNQVSLKLSSVTAADTAVYYCAKHYYYGGSYAMDYWGQGTLVTVSSTRTRGGGGSQVQLVQSGAEVKKPGASVKVSCKASGYTFTSYYIHWVRQAPGQGLEWIGCIYPGNVNTNYNEKFKDRATLTVDTSISTAYMELSRLRSDDTAVYFCTRSHYGLDWNFDVWGQGTTVTVSSGGGGSGGGGSGGGGSDIQMTQSPSSLSASVGDRVTITCHASQNIYVWLNWYQQKPGKAPKLLIYKASNLHTGVPSRFSGSGSGTDFTLTISSLQPEDFATYYCQQGQTYPYTFGGGTKVEIKHHHHHH

SEQ ID NO: 2705 - protein, 521 aa, Artificial Sequence
  Synthetic Polypeptide
MALPVTALLLPLALLLHAARPDEIVLTQSPATLSLSPGERATLSCSASSSVSYMHWYQQKPGQAPRLLIYDTSKLASGIPARFSGSGSGTDFTLTISSLEPEDVAVYYCFQGSVYPFTFGQGTKLEIKRGGGGSGGGGSGGGGSQVQLQESGPGLVKPSQTLSLTCTVSGGSISTSGMGVGWIRQHPGKGLEWIGHIWWDDDKRYNPALKSRVTISVDTSKNQFSLKLSSVTAADTAVYYCARMELWSYYFDYWGQGTLVTVSSTRTRGGGGSQVQLVQSGAEVKKPGASVKVSCKASGYTFTSYYIHWVRQAPGQGLEWIGCIYPGNVNTNYNEKFKDRATLTVDTSISTAYMELSRLRSDDTAVYFCTRSHYGLDWNFDVWGQGTTVTVSSGGGGSGGGGSGGGGSDIQMTQSPSSLSASVGDRVTITCHASQNIYVWLNWYQQKPGKAPKLLIYKASNLHTGVPSRFSGSGSGTDFTLTISSLQPEDFATYYCQQGQTYPYTFGGGTKVEIKHHHHHH

SEQ ID NO: 2706 - protein, 528 aa, Artificial Sequence
  Synthetic Polypeptide
MALPVTALLLPLALLLHAARPDIQLTQSPASLAVSLGQRATISCKASQSVDYDGDSYLNWYQQIPGQPPKLLIYDASNLVSGIPPRFSGSGSGTDFTLNIHPVEKVDAATYHCQQSTEDPWTFGGGTKLEIKGGGGSGGGGSGGGGSQVQLQQSGAELVRPGSSVKISCKASGYAFSSYWMNWVKQRPGQGLEWIGQIWPGDGDTNYNGKFKGKATLTADESSSTAYMQLSSLASEDSAVYFCARRETTTVGRYYYAMDYWGQGTTVTVSSTRTRGGGGSQVQLVQSGAEVKKPGASVKVSCKASGYTFTSYYIHWVRQAPGQGLEWIGCIYPGNVNTNYNEKFKDRATLTVDTSISTAYMELSRLRSDDTAVYFCTRSHYGLDWNFDVWGQGTTVTVSSGGGGSGGGGSGGGGSDIQMTQSPSSLSASVGDRVTITCHASQNIYVWLNWYQQKPGKAPKLLIYKASNLHTGVPSRFSGSGSGTDFTLTISSLQPEDFATYYCQQGQTYPYTFGGGTKVEIKHHHHHH

SEQ ID NO: 2707 - protein, 545 aa, Artificial Sequence
  Synthetic Polypeptide
MALPVTALLLPLALLLHAARPINIYNAEPANPSEKNSPEFDIVMTQSPATLSLSPGERATLSCRSSKSLQNVNGNTYLYWFQQKPGQSPQLLIYRMSNLNSGVPDRFSGSGSGTEFTLTISSLEPEDFAVYYCMQHLEYPITFGAGTKLEIKGGGGSGGGGSGGGGSEVQLVESGGGLVKPGGSLKLSCAASGYTFTSYVMHWVRQAPGKGLEWIGYINPYNDGTKYNEKFQGRVTISSDKSISTAYMELSSLRSEDTAMYYCARGTYYYGTRVFDYWGQGTLVTVSSTRTRGGGGSQVQLVQSGAEVKKPGASVKVSCKASGYTFTSYYIHWVRQAPGQGLEWIGCIYPGNVNTNYNEKFKDRATLTVDTSISTAYMELSRLRSDDTAVYFCTRSHYGLDWNFDVWGQGTTVTVSSGGGGSGGGGSGGGGSDIQMTQSPSSLSASVGDRVTITCHASQNIYVWLNWYQQKPGKAPKLLIYKASNLHTGVPSRFSGSGSGTDFTLTISSLQPEDFATYYCQQGQTYPYTFGGGTKVEIKHHHHHH

SEQ ID NO: 2708 - protein, 522 aa, Artificial Sequence
  Synthetic Polypeptide
MALPVTALLLPLALLLHAARPDIQMTQSPSSLSASVGDRVTITCKASDHINNWLAWYQQKPGQAPKLLIYGATTLETGVPSRFSGSGSGTDYTLTISSLQPEDFATYYCQQSWNTPWTFGQGTKLEIKRGGGGSGGGGSGGGGSQVQLQQPGAELVKPGASVKMSCKASGYAFSSYWINWMKQKPGQGLEWIGQIYPGDGDTNYNGKFKGRATLTADTSSSTAYMQLSSLTSEDSAVYFCARSITTVVGCAMDYWGQGTSVTVSSTRTRGGGGSQVQLVQSGAEVKKPGASVKVSCKASGYTFTSYYIHWVRQAPGQGLEWIGCIYPGNVNTNYNEKFKDRATLTVDTSISTAYMELSRLRSDDTAVYFCTRSHYGLDWNFDVWGQGTTVTVSSGGGGSGGGGSGGGGSDIQMTQSPSSLSASVGDRVTITCHASQNIYVWLNWYQQKPGKAPKLLIYKASNLHTGVPSRFSGSGSGTDFTLTISSLQPEDFATYYCQQGQTYPYTFGGGTKVEIKHHHHHH

SEQ ID NO: 2709 - protein, 522 aa, Artificial Sequence
  Synthetic Polypeptide
MALPVTALLLPLALLLHAARPDIQMTQSPSSLSASVGDRVTITCSASQDISNYLNWYQQKPGKAPKLLIYYTSNLHSGVPSRFSGSGSGTDFTLTISSLQPEDFATYYCQQYRKLPWTFGQGTKLEIKRGGGGSGGGGSGGGGSQVQLVQSGAEVKKPGSSVKVSCKASGGTFSNYWMHWVRQAPGQGLEWMGATYRGHSDTYYNQKFKGRVTITADKSTSTAYMELSSLRSEDTAVYYCARGAIYDGYDVLDNWGQGTLVTVSSTRTRGGGGSQVQLVQSGAEVKKPGASVKVSCKASGYTFTSYYIHWVRQAPGQGLEWIGCIYPGNVNTNYNEKFKDRATLTVDTSISTAYMELSRLRSDDTAVYFCTRSHYGLDWNFDVWGQGTTVTVSSGGGGSGGGGSGGGGSDIQMTQSPSSLSASVGDRVTITCHASQNIYVWLNWYQQKPGKAPKLLIYKASNLHTGVPSRFSGSGSGTDFTLTISSLQPEDFATYYCQQGQTYPYTFGGGTKVEIKHHHHHH

SEQ ID NO: 2710 - protein, 522 aa, Artificial Sequence
  Synthetic Polypeptide
MALPVTALLLPLALLLHAARPDIVLTQSPATLSLSPGDRATISCRASESVTILGSHLIYWYQQKPGQPPRLLIQLASNVQTGVPARFSGSGSRTDFTLTISSVEPEDFAVYYCLQSRTIPRTFGQGTKLEIKRGGGGSGGGGSGGGGSQVQLVQSGPEVKKPGESVKISCKASGYTFRHYSMNWVKQAPGQGLKWMGRINTESGVPIYADDFKGRFSFTVDTSASTAYLEISSLTSEDTAVYFCSNDYLYSLDFWGQGTTLTVSSTRTRGGGGSQVQLVQSGAEVKKPGASVKVSCKASGYTFTSYYIHWVRQAPGQGLEWIGCIYPGNVNTNYNEKFKDRATLTVDTSISTAYMELSRLRSDDTAVYFCTRSHYGLDWNFDVWGQGTTVTVSSGGGGSGGGGSGGGGSDIQMTQSPSSLSASVGDRVTITCHASQNIYVWLNWYQQKPGKAPKLLIYKASNLHTGVPSRFSGSGSGTDFTLTISSLQPEDFATYYCQQGQTYPYTFGGGTKVEIKHHHHHH

SEQ ID NO: 2711 - protein, 521 aa, Artificial Sequence
  Synthetic Polypeptide
MALPVTALLLPLALLLHAARPDIVLTQSPASLAVSLGERATINCRASESVSVIGAHLIHWYQQKPGQPPKLLIYLASNLETGVPARFSGSGSGTDFTLTISSLQAEDAAIYYCLQSRIFPRTFGQGTKLEIKGGGGSGGGGSGGGGSQVQLVQSGSELKKPGESVKISCKASGYTFTDYSINWVKQAPGQGLKWMGWINTETREPAYAYDFRGRFVFSLDTSASTAYLQISSLKAEDTAVYFCALDYSYAMDYWGQGTLVTVSSTRTRGGGGSQVQLVQSGAEVKKPGASVKVSCKASGYTFTSYYIHWVRQAPGQGLEWIGCIYPGNVNTNYNEKFKDRATLTVDTSISTAYMELSRLRSDDTAVYFCTRSHYGLDWNFDVWGQGTTVTVSSGGGGSGGGGSGGGGSDIQMTQSPSSLSASVGDRVTITCHASQNIYVWLNWYQQKPGKAPKLLIYKASNLHTGVPSRFSGSGSGTDFTLTISSLQPEDFATYYCQQGQTYPYTFGGGTKVEIKHHHHHH

SEQ ID NO: 2712 - protein, 522 aa, Artificial Sequence
  Synthetic Polypeptide
MALPVTALLLPLALLLHAARPDIVLTQSPATLSLSPGDRATLSCRASESVTILGSHLIYWYQQKPGQAPRLLIQLASNVQTGIPARFSGSGSRTDFTLTISSLEPEDFAVYYCLQSRTIPRTFGQGTKLEIKRGGGGSGGGGSGGGGSQVQLVQSGSELKKPGESVKISCKASGYTFTHYSMNWVRQAPGQGLEWMGRINTETGEPLYADDFKGRFVFSLDTSASTAYLQISSLKAEDTAVYYCSNDYLYSLDYWGQGTLVTVSSTRTRGGGGSQVQLVQSGAEVKKPGASVKVSCKASGYTFTSYYIHWVRQAPGQGLEWIGCIYPGNVNTNYNEKFKDRATLTVDTSISTAYMELSRLRSDDTAVYFCTRSHYGLDWNFDVWGQGTTVTVSSGGGGSGGGGSGGGGSDIQMTQSPSSLSASVGDRVTITCHASQNIYVWLNWYQQKPGKAPKLLIYKASNLHTGVPSRFSGSGSGTDFTLTISSLQPEDFATYYCQQGQTYPYTFGGGTKVEIKHHHHHH

SEQ ID NO: 2713 - protein, 523 aa, Artificial Sequence
  Synthetic Polypeptide
MALPVTALLLPLALLLHAARPDEIVLTQSPATLSLSPGERATLSCRASQSVSSYLAWYQQKPGQAPRLLIYDASNRATGIPARFSGSGSGTDFTLTISSLEPEDFAVYYCQQRSNWPITFGQGTRLEIKGGGGSGGGGSGGGGSEVQLVESGGGLVQPGRSLRLSCAASGFTFNDYAMHWVRQAPGKGLEWVSTISWNSGSIGYADSVKGRFTISRDNAKKSLYLQMNSLRAEDTALYYCAKDIQYGNYYYGMDVWGQGTTVTVSSTRTRGGGGSQVQLVQSGAEVKKPGASVKVSCKASGYTFTSYYIHWVRQAPGQGLEWIGCIYPGNVNTNYNEKFKDRATLTVDTSISTAYMELSRLRSDDTAVYFCTRSHYGLDWNFDVWGQGTTVTVSSGGGGSGGGGSGGGGSDIQMTQSPSSLSASVGDRVTITCHASQNIYVWLNWYQQKPGKAPKLLIYKASNLHTGVPSRFSGSGSGTDFTLTISSLQPEDFATYYCQQGQTYPYTFGGGTKVEIKHHHHHH

SEQ ID NO: 2714 - protein, 525 aa, Artificial Sequence
  Synthetic Polypeptide
MALPVTALLLPLALLLHAARPDIVMTQTPLSLPVTPGEPASISCRSSKSLLHSNGITYLYWYLQKPGQSPQLLIYQMSNLVSGVPDRFSGSGSGTDFTLKISRVEAEDVGVYYCAQNLELPYTFGGGTKVEIKRGGGGSGGGGSGGGGSQVQLVQSGAEVKKPGSSVKVSCKASGYAFSYSWINWVRQAPGQGLEWMGRIFPGDGDTDYNGKFKGRVTITADKSTSTAYMELSSLRSEDTAVYYCARNVFDGYWLVYWGQGTLVTVSSTRTRGGGGSQVQLVQSGAEVKKPGASVKVSCKASGYTFTSYYIHWVRQAPGQGLEWIGCIYPGNVNTNYNEKFKDRATLTVDTSISTAYMELSRLRSDDTAVYFCTRSHYGLDWNFDVWGQGTTVTVSSGGGGSGGGGSGGGGSDIQMTQSPSSLSASVGDRVTITCHASQNIYVWLNWYQQKPGKAPKLLIYKASNLHTGVPSRFSGSGSGTDFTLTISSLQPEDFATYYCQQGQTYPYTFGGGTKVEIKHHHHHH

SEQ ID NO: 2715 - protein, 522 aa, Artificial Sequence
  Synthetic Polypeptide
MALPVTALLLPLALLLHAARPDIQMTQSPSSLSASVGDRVTITCRASSSVSYMHWYQQKPGKAPKPLIYAPSNLASGVPSRFSGSGSGTDFTLTISSLQPEDFATYYCQQWSFNPPTFGQGTKVEIKRGGGGSGGGGSGGGGSEVQLVESGGGLVQPGGSLRLSCAASGYTFTSYNMHWVRQAPGKGLEWVGAIYPGNGDTSYNQKFKGRFTISVDKSKNTLYLQMNSLRAEDTAVYYCARVVYYSNSYWYFDVWGQGTLVTVSSTRTRGGGGSQVQLVQSGAEVKKPGASVKVSCKASGYTFTSYYIHWVRQAPGQGLEWIGCIYPGNVNTNYNEKFKDRATLTVDTSISTAYMELSRLRSDDTAVYFCTRSHYGLDWNFDVWGQGTTVTVSSGGGGSGGGGSGGGGSDIQMTQSPSSLSASVGDRVTITCHASQNIYVWLNWYQQKPGKAPKLLIYKASNLHTGVPSRFSGSGSGTDFTLTISSLQPEDFATYYCQQGQTYPYTFGGGTKVEIKHHHHHH

SEQ ID NO: 2716 - protein, 524 aa, Artificial Sequence
  Synthetic Polypeptide
MALPVTALLLPLALLLHAARPQIVLSQSPAILSASPGEKVTMTCRASSSVSYMHWYQQKPGSSPKPWIYATSNLASGVPARFSGSGSGTSYSFTISRVEAEDAATYYCQQWTFNPPTFGGGTRLEIKRTVAAGGGGSGGGGSGGGGSQAYLQQSGAELVRPGASVKMSCKASGYTFTSYNMHWVKQTPRQGLEWIGGIYPGNGDTSYNQKFKGKATLTVGKSSSTAYMQLSSLTSEDSAVYFCARYDYNYAMDYWGQGTSVTVSSASTRTRGGGGSQVQLVQSGAEVKKPGASVKVSCKASGYTFTSYYIHWVRQAPGQGLEWIGCIYPGNVNTNYNEKFKDRATLTVDTSISTAYMELSRLRSDDTAVYFCTRSHYGLDWNFDVWGQGTTVTVSSGGGGSGGGGSGGGGSDIQMTQSPSSLSASVGDRVTITCHASQNIYVWLNWYQQKPGKAPKLLIYKASNLHTGVPSRFSGSGSGTDFTLTISSLQPEDFATYYCQQGQTYPYTFGGGTKVEIKHHHHHH

SEQ ID NO: 2717 - protein, 522 aa, Artificial Sequence; identical to SEQ ID NO: 2715
  Synthetic Polypeptide

SEQ ID NO: 2718 - protein, 523 aa, Artificial Sequence
  Synthetic Polypeptide
MALPVTALLLPLALLLHAARPDEIVLTQSPATLSLSPGERATLSCRASQSVSSYLAWYQQKPGQAPRLLIYDASNRATGIPARFSGSGSGTDFTLTISSLEPEDFAVYYCQQRSNWPITFGQGTRLEIKGGGGSGGGGSGGGGSEVQLVESGGGLVQPDRSLRLSCAASGFTFHDYAMHWVRQAPGKGLEWVSTISWNSGTIGYADSVKGRFTISRDNAKNSLYLQMNSLRAEDTALYYCAKDIQYGNYYYGMDVWGQGTTVTVSSTRTRGGGGSQVQLVQSGAEVKKPGASVKVSCKASGYTFTSYYIHWVRQAPGQGLEWIGCIYPGNVNTNYNEKFKDRATLTVDTSISTAYMELSRLRSDDTAVYFCTRSHYGLDWNFDVWGQGTTVTVSSGGGGSGGGGSGGGGSDIQMTQSPSSLSASVGDRVTITCHASQNIYVWLNWYQQKPGKAPKLLIYKASNLHTGVPSRFSGSGSGTDFTLTISSLQPEDFATYYCQQGQTYPYTFGGGTKVEIKHHHHHH

SEQ ID NO: 2719 - protein, 526 aa, Artificial Sequence
  Synthetic Polypeptide
MALPVTALLLPLALLLHAARPDIQMTQSPSSLSASVGDRVTITCRSSQSIVHSVGNTFLEWYQQKPGKAPKLLIYKVSNRFSGVPSRFSGSGSGTDFTLTISSLQPEDFATYYCFQGSQFPYTFGQGTKVEIKRGGGGSGGGGSGGGGSEVQLVESGGGLVQPGGSLRLSCAASGYEFSRSWMNWVRQAPGKGLEWVGRIYPGDGDTNYSGKFKGRFTISADTSKNTAYLQMNSLRAEDTAVYYCARDGSSWDWYFDVWGQGTLVTVSSTRTRGGGGSQVQLVQSGAEVKKPGASVKVSCKASGYTFTSYYIHWVRQAPGQGLEWIGCIYPGNVNTNYNEKFKDRATLTVDTSISTAYMELSRLRSDDTAVYFCTRSHYGLDWNFDVWGQGTTVTVSSGGGGSGGGGSGGGGSDIQMTQSPSSLSASVGDRVTITCHASQNIYVWLNWYQQKPGKAPKLLIYKASNLHTGVPSRFSGSGSGTDFTLTISSLQPEDFATYYCQQGQTYPYTFGGGTKVEIKHHHHHH

SEQ ID NO: 2720 - protein, 518 aa, Artificial Sequence
  Synthetic Polypeptide
MALPVTALLLPLALLLHAARPDIVMTQSPSSLSASVGDRVTITCKASQSVTNDVAWYQQKPGKAPKLLIYYASNRYTGVPSRFSGSGSGTDFTLTISSLQPEDFATYYCQQDYRSPWTFGGGTKVEIKRGGGGSGGGGSGGGGSQVQLEESGGGVVRPGRSLRLSCAASGFTFSDYGVNWIRQAPGKGLEWVTIIWGDGRTDYNSALKSRFTVSRNNSNNTLSLQMNSLTTEDTAVYYCVRAPGNRAMEYWGQGVLVTVSSTRTRGGGGSQVQLVQSGAEVKKPGASVKVSCKASGYTFTSYYIHWVRQAPGQGLEWIGCIYPGNVNTNYNEKFKDRATLTVDTSISTAYMELSRLRSDDTAVYFCTRSHYGLDWNFDVWGQGTTVTVSSGGGGSGGGGSGGGGSDIQMTQSPSSLSASVGDRVTITCHASQNIYVWLNWYQQKPGKAPKLLIYKASNLHTGVPSRFSGSGSGTDFTLTISSLQPEDFATYYCQQGQTYPYTFGGGTKVEIKHHHHHH

SEQ ID NO: 2721 - protein, 524 aa, Artificial Sequence
  Synthetic Polypeptide
MALPVTALLLPLALLLHAARPQVQLQQSGPGLVKPSQTLSLTCAISGDSVSSNSAAWNWIRQSPSRGLEWLGRTYYRSKWYNDYAVSVKSRITINPDTSKNQFSLQLNSVTPEDTAVYYCAREVTGDLEDAFDIWGQGTMVTVSSGGGGSGGGGSGGGGSDIQMTQSPSSLSASVGDRVTITCRASQTIWSYLNWYQQRPGKAPNLLIYAASSLQSGVPSRFSGRGSGTDFTLTISSLQAEDFATYYCQQSYSIPQIFGQGTKLEIKTRTRGGGGSQVQLVQSGAEVKKPGASVKVSCKASGYTFTSYYIHWVRQAPGQGLEWIGCIYPGNVNTNYNEKFKDRATLTVDTSISTAYMELSRLRSDDTAVYFCTRSHYGLDWNFDVWGQGTTVTVSSGGGGSGGGGSGGGGSDIQMTQSPSSLSASVGDRVTITCHASQNIYVWLNWYQQKPGKAPKLLIYKASNLHTGVPSRFSGSGSGTDFTLTISSLQPEDFATYYCQQGQTYPYTFGGGTKVEIKHHHHHH

SEQ ID NO: 2722 - protein, 523 aa, Artificial Sequence
  Synthetic Polypeptide
MALPVTALLLPLALLLHAARPEVQLVESGGGLVQPGRSLRLSCAASGFTFDDYAMHWVRQAPGKGLEWVSGISWNSGSIGYADSVKGRFTISRDNAKNSLYLQMNSLRAEDTALYYCAKDKGGGYYDFWSGSDYWGQGTLVTVSSGGGGSGGGGSGGGGSSSELTQDPAVSVALGQTVRITCQGDSLRSYYASWYQQKPGQAPVLVIYGKNNRPSGIPDRFSGSSSGNTASLTITGAQAEDEADYYCNSRDSSGWVFGGGTKLTVLTRTRGGGGSQVQLVQSGAEVKKPGASVKVSCKASGYTFTSYYIHWVRQAPGQGLEWIGCIYPGNVNTNYNEKFKDRATLTVDTSISTAYMELSRLRSDDTAVYFCTRSHYGLDWNFDVWGQGTTVTVSSGGGGSGGGGSGGGGSDIQMTQSPSSLSASVGDRVTITCHASQNIYVWLNWYQQKPGKAPKLLIYKASNLHTGVPSRFSGSGSGTDFTLTISSLQPEDFATYYCQQGQTYPYTFGGGTKVEIKHHHHHH

SEQ ID NO: 2723 - protein, 532 aa, Artificial Sequence
  Synthetic Polypeptide
MALPVTALLLPLALLLHAARPEVQLQQSGPGLVKPSQTLSLTCAISGDSVLSNSDTWNWIRQSPSRGLEWLGRTYHRSTWYDDYASSVRGRVSINVDTSKNQYSLQLNAVTPEDTGVYYCARDRLQDGNSWSDAFDVWGQGTMVTVSSGGGGSGGGGSGGGGSQSALTQPASVSGSPGQSITISCTGTSSDVGGYNYVSWYQQHPGKAPKLMIYDVSNRPSGVSNRFSGSKSGNTASLTISGLQAEDEADYYCSSYTSSSTLVYVFGTGTKVTVLTRTRGGGGSQVQLVQSGAEVKKPGASVKVSCKASGYTFTSYYIHWVRQAPGQGLEWIGCIYPGNVNTNYNEKFKDRATLTVDTSISTAYMELSRLRSDDTAVYFCTRSHYGLDWNFDVWGQGTTVTVSSGGGGSGGGGSGGGGSDIQMTQSPSSLSASVGDRVTITCHASQNIYVWLNWYQQKPGKAPKLLIYKASNLHTGVPSRFSGSGSGTDFTLTISSLQPEDFATYYCQQGQTYPYTFGGGTKVEIKHHHHHH

SEQ ID NO: 2724 - protein, 524 aa, Artificial Sequence
  Synthetic Polypeptide
MALPVTALLLPLALLLHAARPDDIQMTQTTSSLSASLGDRVTISCRASQDISNYLNWYQQKPDGTVKLLIYYTSILHSGVPSRFSGSGSGTDYSLTISNLEQEDFATYFCQQGNTLPWTFGGGTKLEIKAGGGGSGGGGSGGGGSEVQLVESGGGLVKPGGSLKLSCAASGFAFSIYDMSWVRQTPEKRLEWVAYISSGGGTYYPDTVKGRFTISRDNAKNTLYLQMSSLKSEDTAMYYCARHSGYGTHWGVLFAYWGQGTLVTVSATRTRGGGGSQVQLVQSGAEVKKPGASVKVSCKASGYTFTSYYIHWVRQAPGQGLEWIGCIYPGNVNTNYNEKFKDRATLTVDTSISTAYMELSRLRSDDTAVYFCTRSHYGLDWNFDVWGQGTTVTVSSGGGGSGGGGSGGGGSDIQMTQSPSSLSASVGDRVTITCHASQNIYVWLNWYQQKPGKAPKLLIYKASNLHTGVPSRFSGSGSGTDFTLTISSLQPEDFATYYCQQGQTYPYTFGGGTKVEIKHHHHHH

SEQ ID NO: 2725 - protein, 517 aa, Artificial Sequence
  Synthetic Polypeptide
MALPVTALLLPLALLLHAARPDIQMTQSPATIENTSLSASVGDRVTITCRASQGISSWLTWYQQKPEKAPKSLIYAASSLQSGVPSRFSGSGSGTDFTLTISSLQPEDFATYYCQQYDSYPITFGQGTRLEIKGGGGSGGGGSGGGGSQVQLQQWGAGLLKPSETLSLTCAVYGGSFSAYYWSWIRQPPGKGLEWIGDINHGGGTNYNPSLKSRVTISVDTSKNQFSLKLNSVTAADTAVYYCASLTAYWGQGSLVTVSSTRTRGGGGSQVQLVQSGAEVKKPGASVKVSCKASGYTFTSYYIHWVRQAPGQGLEWIGCIYPGNVNTNYNEKFKDRATLTVDTSISTAYMELSRLRSDDTAVYFCTRSHYGLDWNFDVWGQGTTVTVSSGGGGSGGGGSGGGGSDIQMTQSPSSLSASVGDRVTITCHASQNIYVWLNWYQQKPGKAPKLLIYKASNLHTGVPSRFSGSGSGTDFTLTISSLQPEDFATYYCQQGQTYPYTFGGGTKVEIKHHHHHH

SEQ ID NO: 2726 - protein, 522 aa, Artificial Sequence
  Synthetic Polypeptide
MALPVTALLLPLALLLHAARPDEIVLTQSPDSLAVSLGERATINCKASQSVDFDGDSYLNWYQQKPGQPPKVLIYAASTLQSGVPSRFSGSGSGTDFTLTINSLEAEDAATYYCQQSNEDPWTFGGGTKVEIKGGGGSGGGGSGGGGSQVQLVQSGAEVKKPGASVKVSCKVSGYTFTDYYITWVRQAPGQALEWMGWIYPGSGNTKYSQKFQGRFVFSVDTSASTAYLQLSSLKAEDTAVYYCANYGNYWFAYWGQGTLVTVSSTRTRGGGGSQVQLVQSGAEVKKPGASVKVSCKASGYTFTSYYIHWVRQAPGQGLEWIGCIYPGNVNTNYNEKFKDRATLTVDTSISTAYMELSRLRSDDTAVYFCTRSHYGLDWNFDVWGQGTTVTVSSGGGGSGGGGSGGGGSDIQMTQSPSSLSASVGDRVTITCHASQNIYVWLNWYQQKPGKAPKLLIYKASNLHTGVPSRFSGSGSGTDFTLTISSLQPEDFATYYCQQGQTYPYTFGGGTKVEIKHHHHHH

SEQ ID NO: 2727 - protein, 519 aa, Artificial Sequence
  Synthetic Polypeptide
MALPVTALLLPLALLLHAARPDIQMTQSPSSLSASVGDRVTITCRASQGISSWLAWYQQKPEKAPKSLIYAASSLQSGVPSRFSGSGSGTDFTLTISSLQPEDFATYYCQQYNSYPPTFGGGTKVEIKGGGGSGGGGSGGGGSEVQLVQSGGGLVHPGGSLRLSCAGSGFAFSSSTMHWIRQAPGKGLEWISLIGSGGGIYYGDSVKGRFTISRDNAKNSLYLQMNSLRAEDMAVYYCVRGYFDWVDYFDYWGQGTLVTVSSTRTRGGGGSQVQLVQSGAEVKKPGASVKVSCKASGYTFTSYYIHWVRQAPGQGLEWIGCIYPGNVNTNYNEKFKDRATLTVDTSISTAYMELSRLRSDDTAVYFCTRSHYGLDWNFDVWGQGTTVTVSSGGGGSGGGGSGGGGSDIQMTQSPSSLSASVGDRVTITCHASQNIYVWLNWYQQKPGKAPKLLIYKASNLHTGVPSRFSGSGSGTDFTLTISSLQPEDFATYYCQQGQTYPYTFGGGTKVEIKHHHHHH

SEQ ID NO: 2728 - protein, 529 aa, Artificial Sequence
  Synthetic Polypeptide
MALPVTALLLPLALLLHAARPDDIVMTQSPDSLTVSLGERTTINCKSSQSVLDSSKNKNSLAWYQQKPGQPPKLLLSWASTRESGIPDRFSGSGSGTDFTLTIDSLQPEDSATYYCQQSAHFPITFGQGTRLEIKGGGGSGGGGSGGGGSQVQLVQSGAEVKKPGASVKVSCKASGYTFTNYGMNWVKQAPGQGLKWMGWINTYTGEPTYADDFKGRVTMTSDTSTSTAYLELHNLRSDDTAVYYCARWSWSDGYYVYFDYWGQGTTVTVSSTRTRGGGGSQVQLVQSGAEVKKPGASVKVSCKASGYTFTSYYIHWVRQAPGQGLEWIGCIYPGNVNTNYNEKFKDRATLTVDTSISTAYMELSRLRSDDTAVYFCTRSHYGLDWNFDVWGQGTTVTVSSGGGGSGGGGSGGGGSDIQMTQSPSSLSASVGDRVTITCHASQNIYVWLNWYQQKPGKAPKLLIYKASNLHTGVPSRFSGSGSGTDFTLTISSLQPEDFATYYCQQGQTYPYTFGGGTKVEIKHHHHHH

SEQ ID NO: 2729 - protein, 525 aa, Artificial Sequence
  Synthetic Polypeptide
MALPVTALLLPLALLLHAARPDEIVLTQSPGSLAVSPGERVTMSCKSSQSVFFSSSQKNYLAWYQQIPGQSPRLLIYWASTRESGVPDRFTGSGSGTDFTLTISSVQPEDLAIYYCHQYLSSRTFGQGTKLEIKRGGGGSGGGGSGGGGSQVQLQQPGAEVVKPGASVKMSCKASGYTFTSYYIHWIKQTPGQGLEWVGVIYPGNDDISYNQKFQGKATLTADKSSTTAYMQLSSLTSEDSAVYYCAREVRLRYFDVWGQGTTVTVSSTRTRGGGGSQVQLVQSGAEVKKPGASVKVSCKASGYTFTSYYIHWVRQAPGQGLEWIGCIYPGNVNTNYNEKFKDRATLTVDTSISTAYMELSRLRSDDTAVYFCTRSHYGLDWNFDVWGQGTTVTVSSGGGGSGGGGSGGGGSDIQMTQSPSSLSASVGDRVTITCHASQNIYVWLNWYQQKPGKAPKLLIYKASNLHTGVPSRFSGSGSGTDFTLTISSLQPEDFATYYCQQGQTYPYTFGGGTKVEIKHHHHHH

SEQ ID NO: 2730 - protein, 550 aa, Artificial Sequence
  Synthetic Polypeptide
MALPVTALLLPLALLLHAARPYINIYNAEPANPSEKNSPTQYAYGSGEFDIVMTQSPSSLSASLGGKVTITCKASQDINKYIAWYQHKPGKGPRLLIHYTSTLQPGIPSRFSGSGSGRDYSFSISNLEPEDIATYYCLQYDNLLTFGAGTKLELKRGGGGSGGGGSGGGGSEVKLQQSGPELVKPGTSVKVSCKASGYSFTDYNMYWVKQSHGKSLEWIGYIDPYKGGTIYNQKFKGKATLTVDKSSSTAFMHLNSLTSEDSAVYYCAREMITAYYFDYWGQGSSVTVSSLERTRTRGGGGSQVQLVQSGAEVKKPGASVKVSCKASGYTFTSYYIHWVRQAPGQGLEWIGCIYPGNVNTNYNEKFKDRATLTVDTSISTAYMELSRLRSDDTAVYFCTRSHYGLDWNFDVWGQGTTVTVSSGGGGSGGGGSGGGGSDIQMTQSPSSLSASVGDRVTITCHASQNIYVWLNWYQQKPGKAPKLLIYKASNLHTGVPSRFSGSGSGTDFTLTISSLQPEDFATYYCQQGQTYPYTFGGGTKVEIKHHHHHH

SEQ ID NO: 2731 - protein, 566 aa, Artificial Sequence
  Synthetic Polypeptide
MALPVTALLLPLALLLHAARPDIQMTQSPSSLSASVGDRVTINCKASQDINSYLSWFQQKPGKAPKTLIYRANRLVDGVPSRFSGSGSGQDYTLTISSLQPEDFATYYCLQYDEFPLTFGGGTKVEIKGGGGSGGGGSGGGGSQVQLVQSGAEVKKPGASVKVSCKASGYTFTNYDINWVRQAPGQGLEWIGWIYPGDGSTKYNEKFKAKATLTADTSTSTAYMELRSLRSDDTAVYYCASGYEDAMDYWGQGTTVTVSSAKPTTTPAPRPPTPAPTIASQPLSLRPEACRPAAGGAVHTRGLDFACDITRTRGGGGSQVQLVQSGAEVKKPGASVKVSCKASGYTFTSYYIHWVRQAPGQGLEWIGCIYPGNVNTNYNEKFKDRATLTVDTSISTAYMELSRLRSDDTAVYFCTRSHYGLDWNFDVWGQGTTVTVSSGGGGSGGGGSGGGGSDIQMTQSPSSLSASVGDRVTITCHASQNIYVWLNWYQQKPGKAPKLLIYKASNLHTGVPSRFSGSGSGTDFTLTISSLQPEDFATYYCQQGQTYPYTFGGGTKVEIKHHHHHH

SEQ ID NO: 2732 - protein, 522 aa, Artificial Sequence
  Synthetic Polypeptide
MALPVTALLLPLALLLHAARPEIVLTQSPLSLPVTPGEPASISCRSSQSLLHSNGYNYLDWYLQKPGQSPQLLIYLGVNSVSGVPDRFSGSGSGTDFTLKISRVEAEDVGVYYCMQALQTPWTFGQGTKVEIKGGGGSGGGGSGGGGSQVQLVQSGAEVKKPGSSVKVSCKASGGIFSNHAISWVRQAPGQGLEWMGGIIPIFGTANYAQKFQGRVTITADESTSTAFMELSSLRSEDTAVYYCAREWADVFDIWGQGTMVTVSSTRTRGGGGSQVQLVQSGAEVKKPGASVKVSCKASGYTFTSYYIHWVRQAPGQGLEWIGCIYPGNVNTNYNEKFKDRATLTVDTSISTAYMELSRLRSDDTAVYFCTRSHYGLDWNFDVWGQGTTVTVSSGGGGSGGGGSGGGGSDIQMTQSPSSLSASVGDRVTITCHASQNIYVWLNWYQQKPGKAPKLLIYKASNLHTGVPSRFSGSGSGTDFTLTISSLQPEDFATYYCQQGQTYPYTFGGGTKVEIKHHHHHH

SEQ ID NO: 2733 - protein, 521 aa, Artificial Sequence
  Synthetic Polypeptide
MALPVTALLLPLALLLHAARPDIQMTQSPASLTVSLGQRATISCRASESVDSYGNSYLHWYQQKPGQPPQLLIYLASNLESGVPARFSGSGSRTDFTLTIDPVEADDAATYYCQQNNEDPWTFGGGTKVEIKGGGGSGGGGSGGGGSEVQLQQSGAELVKPGASVKMSCKAFGYTFTTFPIEWMKQSHGKSLEWIGNFHPYNDQTKYNEEFKGRAKLTIDRSSSTVYLELGRLTSDDSAVYYCARGYYYAFDFWGQGTTLTVSSTRTRGGGGSQVQLVQSGAEVKKPGASVKVSCKASGYTFTSYYIHWVRQAPGQGLEWIGCIYPGNVNTNYNEKFKDRATLTVDTSISTAYMELSRLRSDDTAVYFCTRSHYGLDWNFDVWGQGTTVTVSSGGGGSGGGGSGGGGSDIQMTQSPSSLSASVGDRVTITCHASQNIYVWLNWYQQKPGKAPKLLIYKASNLHTGVPSRFSGSGSGTDFTLTISSLQPEDFATYYCQQGQTYPYTFGGGTKVEIKHHHHHH

SEQ ID NO: 2734 - protein, 527 aa, Artificial Sequence
  Synthetic Polypeptide
MALPVTALLLPLALLLHAARPDIVMTQSPDSLAVSLGERATINCESSQSLLNSGNQKNYLTWYQQKPGQPPKPLIYWASTRESGVPDRFSGSGSGTDFTLTISSLQAEDVAVYYCQNDYSYPYTFGQGTKLEIKRGGGGSGGGGSGGGGSEVQLVQSGAEVKKPGESLKISCKGSGYSFTDYYMKWARQMPGKGLEWMGDIIPSNGATFYNQKFKGQVTISADKSISTTYLQWSSLKASDTAMYYCARSHLLRASWFAYWGQGTMVTVSSTRTRGGGGSQVQLVQSGAEVKKPGASVKVSCKASGYTFTSYYIHWVRQAPGQGLEWIGCIYPGNVNTNYNEKFKDRATLTVDTSISTAYMELSRLRSDDTAVYFCTRSHYGLDWNFDVWGQGTTVTVSSGGGGSGGGGSGGGGSDIQMTQSPSSLSASVGDRVTITCHASQNIYVWLNWYQQKPGKAPKLLIYKASNLHTGVPSRFSGSGSGTDFTLTISSLQPEDFATYYCQQGQTYPYTFGGGTKVEIKHHHHHH

SEQ ID NO: 2735 - protein, 522 aa, Artificial Sequence
  Synthetic Polypeptide
MALPVTALLLPLALLLHAARPDIVLTQSPASLAVSLGQRATISCRASESVDNYGNTFMHWYQQKPGQPPKLLIYRASNLESGIPARFSGSGSRTDFTLTINPVEADDVATYYCQQSNEDPPTFGAGTKLELKGGGGSGGGGSGGGGSQIQLVQSGPELKKPGETVKISCKASGYIFTNYGMNWVKQAPGKSFKWMGWINTYTGESTYSADFKGRFAFSLETSASTAYLHINDLKNEDTATYFCARSGGYDPMDYWGQGTSVTVSSTRTRGGGGSQVQLVQSGAEVKKPGASVKVSCKASGYTFTSYYIHWVRQAPGQGLEWIGCIYPGNVNTNYNEKFKDRATLTVDTSISTAYMELSRLRSDDTAVYFCTRSHYGLDWNFDVWGQGTTVTVSSGGGGSGGGGSGGGGSDIQMTQSPSSLSASVGDRVTITCHASQNIYVWLNWYQQKPGKAPKLLIYKASNLHTGVPSRFSGSGSGTDFTLTISSLQPEDFATYYCQQGQTYPYTFGGGTKVEIKHHHHHH

SEQ ID NO: 2736 - protein, 526 aa, Artificial Sequence
  Synthetic Polypeptide
MALPVTALLLPLALLLHAARPDFVMTQSPDSLAVSLGERVTMSCKSSQSLLNSGNQKNYLTWYQQKPGQPPKLLIYWASTRESGVPDRFSGSGSGTDFTLTISSLQAEDVAVYYCQNDYSYPYTFGQGTKLEIKGGGGSGGGGSGGGGSEVQLVQSGAELKKPGASVKVSCKASGYTFTDYYMKWVRQAPGQGLEWIGDIIPSNGATFYNQKFKGRVTITVDKSTSTAYMELSSLRSEDTAVYYCARSHLLRASWFAYWGQGTLVTVSSTRTRGGGGSQVQLVQSGAEVKKPGASVKVSCKASGYTFTSYYIHWVRQAPGQGLEWIGCIYPGNVNTNYNEKFKDRATLTVDTSISTAYMELSRLRSDDTAVYFCTRSHYGLDWNFDVWGQGTTVTVSSGGGGSGGGGSGGGGSDIQMTQSPSSLSASVGDRVTITCHASQNIYVWLNWYQQKPGKAPKLLIYKASNLHTGVPSRFSGSGSGTDFTLTISSLQPEDFATYYCQQGQTYPYTFGGGTKVEIKHHHHHH

SEQ ID NO: 2737 - protein, 526 aa, Artificial Sequence
  Synthetic Polypeptide
MALPVTALLLPLALLLHAARPDFVMTQSPDSLAVSLGERVTMSCKSSQSLLNSGNQKNYLTWYQQKPGQPPKLLIYWASTRESGVPDRFSGSGSGTDFTLTISSLQAEDVAVYYCQNDYSYPYTFGQGTKLEIKGGGGSGGGGSGGGGSQVQLVQSGAELKKPGASVKVSCKASGYTFTDYYMKWVRQAPGQGLEWIGDIIPSNGATFYNQKFKGRVTITVDKSTSTAYMELSSLRSEDTAVYYCARSHLLRASWFAYWGQGTLVTVSSTRTRGGGGSQVQLVQSGAEVKKPGASVKVSCKASGYTFTSYYIHWVRQAPGQGLEWIGCIYPGNVNTNYNEKFKDRATLTVDTSISTAYMELSRLRSDDTAVYFCTRSHYGLDWNFDVWGQGTTVTVSSGGGGSGGGGSGGGGSDIQMTQSPSSLSASVGDRVTITCHASQNIYVWLNWYQQKPGKAPKLLIYKASNLHTGVPSRFSGSGSGTDFTLTISSLQPEDFATYYCQQGQTYPYTFGGGTKVEIKHHHHHH

SEQ ID NO: 2738 - protein, 527 aa, Artificial Sequence
  Synthetic Polypeptide
MALPVTALLLPLALLLHAARPDIVMTQSPSSLAVSEGETVTINCKSSQSFLSSGDGKNYVAWYQYKPGQSPKLLIYWASTRQSGVPDRFIGSGSGTDFTLTISTVQAEDLAIYYCQQYYDTPLTFGSGTKLEIKGGGGSGGGGSGGGGSEVKLQESGPSLVQSSQTLSLTCTVSGFSLTSYHIHWVRQTPGKGLEWMGVMWSDGDTSYNSALKSRLSISRDTSQSQVFLKMNSLQTEDTATYYCARGYYSSYLYLWFAYWGQGTLVTVSSTRTRGGGGSQVQLVQSGAEVKKPGASVKVSCKASGYTFTSYYIHWVRQAPGQGLEWIGCIYPGNVNTNYNEKFKDRATLTVDTSISTAYMELSRLRSDDTAVYFCTRSHYGLDWNFDVWGQGTTVTVSSGGGGSGGGGSGGGGSDIQMTQSPSSLSASVGDRVTITCHASQNIYVWLNWYQQKPGKAPKLLIYKASNLHTGVPSRFSGSGSGTDFTLTISSLQPEDFATYYCQQGQTYPYTFGGGTKVEIKHHHHHH

SEQ ID NO: 2739 - protein, 531 aa, Artificial Sequence
  Synthetic Polypeptide
MALPVTALLLPLALLLHAARPDVLMTQTPVSLPVSLGGQVSISCRSSQSLVHSDGDTYLHWYLQKPGQSPQLLIYRVSNRFSGVPDRFSGSGSGTDFTLKISRVEPEDLGLYYCLQTTHFPPWTFGGGTKLEMKGGGGSGGGGSGGGGSQVQLQQSGPELRRPGSSVRLSCKASGYRIKDFLIHWIKNRPEHGLEWIGWIDPEDGETKYAQKFQTKATLTADTSSNTAYMQLSSLTSEDTATYFCARWGDVYYGLMRGHVMDAWGQGTSVTVSSTRTRGGGGSQVQLVQSGAEVKKPGASVKVSCKASGYTFTSYYIHWVRQAPGQGLEWIGCIYPGNVNTNYNEKFKDRATLTVDTSISTAYMELSRLRSDDTAVYFCTRSHYGLDWNFDVWGQGTTVTVSSGGGGSGGGGSGGGGSDIQMTQSPSSLSASVGDRVTITCHASQNIYVWLNWYQQKPGKAPKLLIYKASNLHTGVPSRFSGSGSGTDFTLTISSLQPEDFATYYCQQGQTYPYTFGGGTKVEIKHHHHHH

SEQ ID NO: 2740 - protein, 522 aa, Artificial Sequence
  Synthetic Polypeptide
MALPVTALLLPLALLLHAARPDIQMTQSTSSLSASLGDRVTISCSASQGINNYLNWYQQKPDGTVELLIYYTSTLQSGVPSRFSGSGSGTDYSLTISNLEPEDIGTYYCQQYSKLPRTFGGGTKLEIKGGGGSGGGGSGGGGSQVQLQQSGSELMMPGASVKISCKATGYTFSNYWIEWVKQRPGHGLEWIGEILPGTGRTIYNEKFKGKATFTADISSNTVQMQLSSLTSEDSAVYYCARRDYYGNFYYAMDYWGQGTSVTVSSTRTRGGGGSQVQLVQSGAEVKKPGASVKVSCKASGYTFTSYYIHWVRQAPGQGLEWIGCIYPGNVNTNYNEKFKDRATLTVDTSISTAYMELSRLRSDDTAVYFCTRSHYGLDWNFDVWGQGTTVTVSSGGGGSGGGGSGGGGSDIQMTQSPSSLSASVGDRVTITCHASQNIYVWLNWYQQKPGKAPKLLIYKASNLHTGVPSRFSGSGSGTDFTLTISSLQPEDFATYYCQQGQTYPYTFGGGTKVEIKHHHHHH

SEQ ID NO: 2741 - protein, 519 aa, Artificial Sequence
  Synthetic Polypeptide
MALPVTALLLPLALLLHAARPDIQMTQSPSSLSASVGDRVTITCKASQDVGIAVAWYQQKPGKVPKLLIYWASTRHTGVPDRFSGSGSGTDFTLTISSLQPEDVATYYCQQYSSYPYTFGQGTKVEIKGGGGSGGGGSGGGGSEVQLVESGGGLVQPGGSLRLSCAASGFDFSRYWMSWVRQAPGKGLEWIGEINPDSSTINYAPSLKDKFIISRDNAKNSLYLQMNSLRAEDTAVYYCARPDGNYWYFDVWGQGTLVTVSSTRTRGGGGSQVQLVQSGAEVKKPGASVKVSCKASGYTFTSYYIHWVRQAPGQGLEWIGCIYPGNVNTNYNEKFKDRATLTVDTSISTAYMELSRLRSDDTAVYFCTRSHYGLDWNFDVWGQGTTVTVSSGGGGSGGGGSGGGGSDIQMTQSPSSLSASVGDRVTITCHASQNIYVWLNWYQQKPGKAPKLLIYKASNLHTGVPSRFSGSGSGTDFTLTISSLQPEDFATYYCQQGQTYPYTFGGGTKVEIKHHHHHH

SEQ ID NO: 2742 - protein, 520 aa, Artificial Sequence
  Synthetic Polypeptide
MALPVTALLLPLALLLHAARPDIVMTQSQKSMSTSVGDRVSITCKASQDVITGVAWYQQKPGQSPKLLIYSASYRYTGVPDRFTGSGSGTDFTFTISNVQAEDLAVYYCQQHYSTPLTFGAGTKLELKGGGGSGGGGSGGGGSQVQLQQPGAELVRPGASVKLSCKASGYSFTTYWMNWVKQRPGQGLEWIGMIHPSDSETRLNQKFKDKATLTVDKSSSTAYMQLSSPTSEDSAVYYCARSTMIATRAMDYWGQGTSVTVSSTRTRGGGGSQVQLVQSGAEVKKPGASVKVSCKASGYTFTSYYIHWVRQAPGQGLEWIGCIYPGNVNTNYNEKFKDRATLTVDTSISTAYMELSRLRSDDTAVYFCTRSHYGLDWNFDVWGQGTTVTVSSGGGGSGGGGSGGGGSDIQMTQSPSSLSASVGDRVTITCHASQNIYVWLNWYQQKPGKAPKLLIYKASNLHTGVPSRFSGSGSGTDFTLTISSLQPEDFATYYCQQGQTYPYTFGGGTKVEIKHHHHHH

SEQ ID NO: 2743 - protein, 525 aa, Artificial Sequence
  Synthetic Polypeptide
MALPVTALLLPLALLLHAARPDDIQMTQSPSSLSASVGDRVTITCRASQSISSYLNWYQQKPGKAPKLLIYAASSLQSGVPSRFSGSGSGTDFTLTISSLQPEDLATYYCQQSYSTPFTFGPGTKVDIKGGGGSGGGGSGGGGSVHEVQLVQSGAEVKKPGSSVKVSCKASGGTFSSYAISWVRQAPGQGLEWMGGIIPIFGTANYAQKFQGRVTITADKSTSTAYMELSSLRSEDTAVYYCATFALFGFREQAFDIWGQGTTVTVSSTRTRGGGGSQVQLVQSGAEVKKPGASVKVSCKASGYTFTSYYIHWVRQAPGQGLEWIGCIYPGNVNTNYNEKFKDRATLTVDTSISTAYMELSRLRSDDTAVYFCTRSHYGLDWNFDVWGQGTTVTVSSGGGGSGGGGSGGGGSDIQMTQSPSSLSASVGDRVTITCHASQNIYVWLNWYQQKPGKAPKLLIYKASNLHTGVPSRFSGSGSGTDFTLTISSLQPEDFATYYCQQGQTYPYTFGGGTKVEIKHHHHHH

SEQ ID NO: 2744 - protein, 520 aa, Artificial Sequence
  Synthetic Polypeptide
MALPVTALLLPLALLLHAARPDQIVLTQSPAIMSASPGEKVTISCSASSSVSYMYWYQQKPGSSPKPWIYRTSNLASGVPARFSGSGSGTSYSLTISNMEAEDAAAYYCQQYHSYPTTFGGGTKLEVKGGGGSGGGGSGGGGSEVQLVESGGGLVQPKGSLKLSCAASGFSFNTYAMNWVRQAPGKGLEWIAHIRSKSNNFATYYADSVKDRFSISRDASENILFLQMNNLKTEDTAMYYCVRQGGDFPMDYWGQGTSVTVSSTRTRGGGGSQVQLVQSGAEVKKPGASVKVSCKASGYTFTSYYIHWVRQAPGQGLEWIGCIYPGNVNTNYNEKFKDRATLTVDTSISTAYMELSRLRSDDTAVYFCTRSHYGLDWNFDVWGQGTTVTVSSGGGGSGGGGSGGGGSDIQMTQSPSSLSASVGDRVTITCHASQNIYVWLNWYQQKPGKAPKLLIYKASNLHTGVPSRFSGSGSGTDFTLTISSLQPEDFATYYCQQGQTYPYTFGGGTKVEIKHHHHHH

SEQ ID NO: 2745 - protein, 519 aa, Artificial Sequence
  Synthetic Polypeptide
MALPVTALLLPLALLLHAARPDDIQMTQSSSSFSVSLGDRVTITCMASEDIYIRLAWYQQKPGNAPRLLISAATSLETGVPSRFSGSGSGKDYTLSITSLQTEDVGTYYCQQYWSSPWTFGGGTKLEINGGGGSGGGGSGGGGSDVQLQESGPGLVKPSQSLSLTCTVTGYSITSDYTWNWIRQFPGNKLEWMGYITYSGSTSYNPSLKSRNSITRDTSKNQFFLQLNSVTTEDTATYYCARLGRRYTMDYWGQGTSVTVSSTRTRGGGGSQVQLVQSGAEVKKPGASVKVSCKASGYTFTSYYIHWVRQAPGQGLEWIGCIYPGNVNTNYNEKFKDRATLTVDTSISTAYMELSRLRSDDTAVYFCTRSHYGLDWNFDVWGQGTTVTVSSGGGGSGGGGSGGGGSDIQMTQSPSSLSASVGDRVTITCHASQNIYVWLNWYQQKPGKAPKLLIYKASNLHTGVPSRFSGSGSGTDFTLTISSLQPEDFATYYCQQGQTYPYTFGGGTKVEIKHHHHHH

SEQ ID NO: 2746 - protein, 519 aa, Artificial Sequence
  Synthetic Polypeptide
MALPVTALLLPLALLLHAARPDIQMTQSSSSFSVSLGDRVTITCKASEDIYIRLAWYQQKPGNAPRLLISAATSLETGIPSRFSGSGSGEDYTLTITSLQTEDVATYYCQQYWTTPWTFGGGTKLEIKRGGGGSGGGGSGGGGSDVQLQESGPGLVKPSQSLSLTCTVTGYSITIDYTWNWIRQFPGNKLEWMGYITYSGSTDYNPSLKSRSSITRDTSMNQFFLQLNSVTTEDTATYYCARLGRRYALDYWGQGTSVTVSSTRTRGGGGSQVQLVQSGAEVKKPGASVKVSCKASGYTFTSYYIHWVRQAPGQGLEWIGCIYPGNVNTNYNEKFKDRATLTVDTSISTAYMELSRLRSDDTAVYFCTRSHYGLDWNFDVWGQGTTVTVSSGGGGSGGGGSGGGGSDIQMTQSPSSLSASVGDRVTITCHASQNIYVWLNWYQQKPGKAPKLLIYKASNLHTGVPSRFSGSGSGTDFTLTISSLQPEDFATYYCQQGQTYPYTFGGGTKVEIKHHHHHH

SEQ ID NO: 2747 - protein, 518 aa, Artificial Sequence
  Synthetic Polypeptide
MALPVTALLLPLALLLHAARPDVVMTQSPSSLSASVGDRVTITCMASEDIYIRLAWYQQKPGNAPKLLIYAATSLETGVPSRFSGSGSGTDFTLTISSLQPEDFATYYCQQYWSSPWTFGGGTKVEIKGGGGSGGGGSGGGGSQVQLQESGPGLVKPSQTLSLTCTVSGYSITSDYTWNWIRQPPGNGLEWIGYITYSGSTSYNPSLKSRVLISVDTSKNQVSLKLSSVTAADTAVYYCARLGRRYTMDYWGQGTTVTVSSTRTRGGGGSQVQLVQSGAEVKKPGASVKVSCKASGYTFTSYYIHWVRQAPGQGLEWIGCIYPGNVNTNYNEKFKDRATLTVDTSISTAYMELSRLRSDDTAVYFCTRSHYGLDWNFDVWGQGTTVTVSSGGGGSGGGGSGGGGSDIQMTQSPSSLSASVGDRVTITCHASQNIYVWLNWYQQKPGKAPKLLIYKASNLHTGVPSRFSGSGSGTDFTLTISSLQPEDFATYYCQQGQTYPYTFGGGTKVEIKHHHHHH

SEQ ID NO: 2748 - protein, 522 aa, Artificial Sequence
  Synthetic Polypeptide
MALPVTALLLPLALLLHAARPEIVLTQSPATLSLSPGERATLSCSASSSVSYMYWYQQKPGQAPRLLIYRTSNLASGIPARFSGSGSGTDFTLTISSLEPEDFAVYYCQQYHSYPTTFGQGTKVEIKRTVGGGGSGGGGSGGGGSEVQLVESGGGLVQPGGSLRLSCAASGFSFNTYAMNWVRQAPGKGLEWVSHIRSKSNNFATYYADSVKDRFTISRDNAKNSLYLQMNSLRAEDTAVYYCARQGGDFPMDYWGQGTLVTVSSTRTRGGGGSQVQLVQSGAEVKKPGASVKVSCKASGYTFTSYYIHWVRQAPGQGLEWIGCIYPGNVNTNYNEKFKDRATLTVDTSISTAYMELSRLRSDDTAVYFCTRSHYGLDWNFDVWGQGTTVTVSSGGGGSGGGGSGGGGSDIQMTQSPSSLSASVGDRVTITCHASQNIYVWLNWYQQKPGKAPKLLIYKASNLHTGVPSRFSGSGSGTDFTLTISSLQPEDFATYYCQQGQTYPYTFGGGTKVEIKHHHHHH

SEQ ID NO: 2749 - protein, 518 aa, Artificial Sequence
  Synthetic Polypeptide
MALPVTALLLPLALLLHAARPDVVMTQSPSSLSASVGDRVTITCKASEDIYIRLAWYQQKPGKAPKLLIYAATSLETGVPSRFSGSGSGTDFTLTISSLQPEDFATYYCQQYWTTPWTFGGGTKVEIKGGGGSGGGGSGGGGSQVQLQESGPGLVKPSQTLSLTCTVSGYSITIDYTWNWIRQPPGKGLEWIGYITYSGSTDYNPSLKSRVLISVDTSKNQVSLKLSSVTAADTAVYYCARLGRRYALDYWGQGTTVTVSSTRTRGGGGSQVQLVQSGAEVKKPGASVKVSCKASGYTFTSYYIHWVRQAPGQGLEWIGCIYPGNVNTNYNEKFKDRATLTVDTSISTAYMELSRLRSDDTAVYFCTRSHYGLDWNFDVWGQGTTVTVSSGGGGSGGGGSGGGGSDIQMTQSPSSLSASVGDRVTITCHASQNIYVWLNWYQQKPGKAPKLLIYKASNLHTGVPSRFSGSGSGTDFTLTISSLQPEDFATYYCQQGQTYPYTFGGGTKVEIKHHHHHH

SEQ ID NO: 2750 - protein, 519 aa, Artificial Sequence
  Synthetic Polypeptide
MALPVTALLLPLALLLHAARPDIQMTQSPASLSASVGETVTIICRASVNIYSYLAWYQQKQGKSPQLLVYNAKILAEGVPSRFSGSGSGTQFSLKINSLQPEDFGSYYCQHHYGTFTFGSGTKLEIKRGGGGSGGGGSGGGGSQVQLKESGPGLVAPSQSLSITCTISGFSLTSYGVHWVRQPPGKGLEWLVVIWSDGSTTYNSALKSRLSISKDNSKSQVFLKMNSLQTDDTAIYYCASHYGSTLAFASWGHGTLVTVSAATRTRGGGGSQVQLVQSGAEVKKPGASVKVSCKASGYTFTSYYIHWVRQAPGQGLEWIGCIYPGNVNTNYNEKFKDRATLTVDTSISTAYMELSRLRSDDTAVYFCTRSHYGLDWNFDVWGQGTTVTVSSGGGGSGGGGSGGGGSDIQMTQSPSSLSASVGDRVTITCHASQNIYVWLNWYQQKPGKAPKLLIYKASNLHTGVPSRFSGSGSGTDFTLTISSLQPEDFATYYCQQGQTYPYTFGGGTKVEIKHHHHHH

SEQ ID NO: 2751 - protein, 527 aa, Artificial Sequence
  Synthetic Polypeptide
MALPVTALLLPLALLLHAARPDIVMTQSHKFMSTSVGDRVSVTCKASQNVGNNVAWYQQKPGQSPKVLIYSASYRYSGVPDRFTGSGSGTDFTLTISNVQSEDLAEYFCQQYNTYPFTFGSGTKLEIKGGGGSGGGGSGGGGSEVQLEESGGGLVQPGGSMKLSCVASGFTFSNYWMNWVRQSPEKGLEWVAEIRFKSHNYATHFAESVKGRFTISRDDSKSSVYLQMNNLRAEDTGIYYCTRRIGNSDYDWWYFDVWGAGTSVTVSSASTRTRGGGGSQVQLVQSGAEVKKPGASVKVSCKASGYTFTSYYIHWVRQAPGQGLEWIGCIYPGNVNTNYNEKFKDRATLTVDTSISTAYMELSRLRSDDTAVYFCTRSHYGLDWNFDVWGQGTTVTVSSGGGGSGGGGSGGGGSDIQMTQSPSSLSASVGDRVTITCHASQNIYVWLNWYQQKPGKAPKLLIYKASNLHTGVPSRFSGSGSGTDFTLTISSLQPEDFATYYCQQGQTYPYTFGGGTKVEIKHHHHHH

SEQ ID NO: 2752 - protein, 523 aa, Artificial Sequence
  Synthetic Polypeptide
MALPVTALLLPLALLLHAARPDIVMTQSPDSLAVSLGERATINCRASKSVSTSGYSFMHWYQQKPGQPPKLLIYLASNLESGVPDRFSGSGSGTDFTLTISSLQAEDVAVYYCQHSREVPWTFGQGTKVEIKRGGGGSGGGGSGGGGSQVQLVQSGAEVKKPGASVKVSCKASGYTFTNYGMNWVRQAPGQGLEWMGWINTYTGEPTYADAFKGRFAFSLDTSTSTAYLQINSLRSDDTAVYYCARDYGDYGMDYWGQGTTVTVSSTRTRGGGGSQVQLVQSGAEVKKPGASVKVSCKASGYTFTSYYIHWVRQAPGQGLEWIGCIYPGNVNTNYNEKFKDRATLTVDTSISTAYMELSRLRSDDTAVYFCTRSHYGLDWNFDVWGQGTTVTVSSGGGGSGGGGSGGGGSDIQMTQSPSSLSASVGDRVTITCHASQNIYVWLNWYQQKPGKAPKLLIYKASNLHTGVPSRFSGSGSGTDFTLTISSLQPEDFATYYCQQGQTYPYTFGGGTKVEIKHHHHHH

SEQ ID NO: 2753 - protein, 519 aa, Artificial Sequence
  Synthetic Polypeptide
MALPVTALLLPLALLLHAARPDIVMTQTPLTLSVTIGQPASISCKSSQSLLDSDGKTYLNWLLQRPGQSPERLIYLVSKLDSGVPDRFTGSGSGTDFTLKISRVEAEDLGVYCCWQGTHFPYTFGGGTKVEIKGGGGGSGGGGSGGGGSQVQLQQPGAELVRPGASVKLSCKASGYTFTSYWMNWVKQRPGQGLEWIGMIDPSDSETHYNHIFKDKATLTVDKSSSTAYLQLSSLTSEDSAVYYCARNLYLWGQGTSVTVSSTRTRGGGGSQVQLVQSGAEVKKPGASVKVSCKASGYTFTSYYIHWVRQAPGQGLEWIGCIYPGNVNTNYNEKFKDRATLTVDTSISTAYMELSRLRSDDTAVYFCTRSHYGLDWNFDVWGQGTTVTVSSGGGGSGGGGSGGGGSDIQMTQSPSSLSASVGDRVTITCHASQNIYVWLNWYQQKPGKAPKLLIYKASNLHTGVPSRFSGSGSGTDFTLTISSLQPEDFATYYCQQGQTYPYTFGGGTKVEIKHHHHHH

SEQ ID NO: 2754 - protein, 517 aa, Artificial Sequence
  Synthetic Polypeptide
MALPVTALLLPLALLLHAARPDIQMTQSPASLSVSVGETVTITCRASENIYSNLAWYQQKQGKSPQLLVYAATNLADGVPSRFSGSGSGTQYSLKINSLQSEDFGSYYCQHFWGTWTFGGGTTLEIKGGGGSGGGGSGGGGSEVQLQQSGPELVKPGASVKMSCKASGYTFTDYYMKWMKQSHGKSLEWIGDINPNNGGTTYNQKFKGKATLTVDKSSSTAYMQLNSLTSEDSAVYYCARDYGYGYFDYWGQGTTLTVSSTRTRGGGGSQVQLVQSGAEVKKPGASVKVSCKASGYTFTSYYIHWVRQAPGQGLEWIGCIYPGNVNTNYNEKFKDRATLTVDTSISTAYMELSRLRSDDTAVYFCTRSHYGLDWNFDVWGQGTTVTVSSGGGGSGGGGSGGGGSDIQMTQSPSSLSASVGDRVTITCHASQNIYVWLNWYQQKPGKAPKLLIYKASNLHTGVPSRFSGSGSGTDFTLTISSLQPEDFATYYCQQGQTYPYTFGGGTKVEIKHHHHHH

SEQ ID NO: 2755 - protein, 521 aa, Artificial Sequence
  Synthetic Polypeptide
MALPVTALLLPLALLLHAARPQSVLTQPPSASGTPGQRVTISCSGSRSNVGGNYVFWYQQVPGATPKLLIYRSNQRPSGVPDRFAGSKSGSSASLAISGLRSEDEADYYCATWDDSLSGFVFGTGTKVTVLGGGGGSGGGGSGGGGSEVQLVESGGGLVKPGGSLRLSCAASGFTFSDYYMSWIRQAPGKGLEWVSYISSSGSTIYYADSVKGRFTISRDNAKNSLYLQMNSLRAEDTAVYYCARGYGKAYDQWGQGTLVTVSSTRTRGGGGSQVQLVQSGAEVKKPGASVKVSCKASGYTFTSYYIHWVRQAPGQGLEWIGCIYPGNVNTNYNEKFKDRATLTVDTSISTAYMELSRLRSDDTAVYFCTRSHYGLDWNFDVWGQGTTVTVSSGGGGSGGGGSGGGGSDIQMTQSPSSLSASVGDRVTITCHASQNIYVWLNWYQQKPGKAPKLLIYKASNLHTGVPSRFSGSGSGTDFTLTISSLQPEDFATYYCQQGQTYPYTFGGGTKVEIKHHHHHH

SEQ ID NO: 2756 - protein, 520 aa, Artificial Sequence
  Synthetic Polypeptide
MALPVTALLLPLALLLHAARPQSVVTQPPSMSAAPGQQVTISCSGGNSNIERNYVSWYLQLPGTAPKLVIFDNDRRPSGIPDRFSGSKSGTSATLGITGLQTGDEADYYCGTWDSSLRGWVFGGGTKLTVLGGGGGSGGGGSGGGGSEVQLVESGGGLIQPGGSLRLSCAASGFTFSNYAMNWVRQAPGKGLEWVSTINGRGSSTIYADSVKGRFTISRDNSKNTLYLQMNSLRAEDTATYYCARYISRGLGDSWGQGTLVTVTRTRGGGGSQVQLVQSGAEVKKPGASVKVSCKASGYTFTSYYIHWVRQAPGQGLEWIGCIYPGNVNTNYNEKFKDRATLTVDTSISTAYMELSRLRSDDTAVYFCTRSHYGLDWNFDVWGQGTTVTVSSGGGGSGGGGSGGGGSDIQMTQSPSSLSASVGDRVTITCHASQNIYVWLNWYQQKPGKAPKLLIYKASNLHTGVPSRFSGSGSGTDFTLTISSLQPEDFATYYCQQGQTYPYTFGGGTKVEIKHHHHHH

SEQ ID NO: 2757 - protein, 523 aa, Artificial Sequence
  Synthetic Polypeptide
MALPVTALLLPLALLLHAARPDIVLTQSPLSLAVSLGQPAIISCKASQSVSFAGTSLMHWYHQKPGQQPRLLIYRASNLEAGVPDRFSGSGSKTDFTLTISPVEAEDAATYYCQQSREYPYTFGGGTKLEIKRGGGGSGGGGSGGGGSQVQLVQSGAEVVKPGASVKISCKASGYTFTGYFMNWVKQSPGQSLEWIGRIHPYDGDTFYNQKFQGKATLTVDKSSNTAHMELLSLTSEDFAVYYCTRYDGSRAMDYWGQGTTVTVSSTRTRGGGGSQVQLVQSGAEVKKPGASVKVSCKASGYTFTSYYIHWVRQAPGQGLEWIGCIYPGNVNTNYNEKFKDRATLTVDTSISTAYMELSRLRSDDTAVYFCTRSHYGLDWNFDVWGQGTTVTVSSGGGGSGGGGSGGGGSDIQMTQSPSSLSASVGDRVTITCHASQNIYVWLNWYQQKPGKAPKLLIYKASNLHTGVPSRFSGSGSGTDFTLTISSLQPEDFATYYCQQGQTYPYTFGGGTKVEIKHHHHHH

SEQ ID NO: 2758 - protein, 517 aa, Artificial Sequence
  Synthetic Polypeptide
MALPVTALLLPLALLLHAARPDIQMTQTTSSLSASLGDRVTISCRASQDISKYLNWYQQKPDGTVKLLIYHTSRLHSGVPSRFSGSGSGTDYSLTISNLEQEDIATYFCQQGNTLPYTFGGGTKLEITGGGGSGGGGSGGGGSEVKLQESGPGLVAPSQSLSVTCTVSGVSLPDYGVSWIRQPPRKGLEWLGVIWGSETTYYNSALKSRLTIIKDNSKSQVFLKMNSLQTDDTAIYYCAKHYYYGGSYAMDYWGQGTSVTVSSRVTRGGGGSEVQLVQSGAEVKKPGESLRISCKGSGYSFSTYWISWVRQMPGKGLEWMGKIYPGDSYTNYSPSFQGQVTISADKSISTAYLQWSSLKASDTAMYYCARGYGIFDYWGQGTLVTVSSGGGGSGGGGSGGGGSSYELTQPPSVSVSPGQTASITCSGDNIGDQYAHWYQQKPGQSPVLVIYQDKNRPSGIPERFSGSNSGNTATLTISGTQAMDEADYYCATYTGFGSLAVFGGGTKLTVLHHHHHH

SEQ ID NO: 2759 - protein, 517 aa, Artificial Sequence
  Synthetic Polypeptide
MALPVTALLLPLALLLHAARPEIVMTQSPATLSLSPGERATLSCRASQDISKYLNWYQQKPGQAPRLLIYHTSRLHSGIPARFSGSGSGTDYTLTISSLQPEDFAVYFCQQGNTLPYTFGQGTKLEIKGGGGSGGGGSGGGGSQVQLQESGPGLVKPSETLSLTCTVSGVSLPDYGVSWIRQPPGKGLEWIGVIWGSETTYYNSSLKSRVTISKDNSKNQVSLKLSSVTAADTAVYYCAKHYYYGGSYAMDYWGQGTLVTVSSTRTRGGGGSEVQLVQSGAEVKKPGESLRISCKGSGYSFSTYWISWVRQMPGKGLEWMGKIYPGDSYTNYSPSFQGQVTISADKSISTAYLQWSSLKASDTAMYYCARGYGIFDYWGQGTLVTVSSGGGGSGGGGSGGGGSSYELTQPPSVSVSPGQTASITCSGDNIGDQYAHWYQQKPGQSPVLVIYQDKNRPSGIPERFSGSNSGNTATLTISGTQAMDEADYYCATYTGFGSLAVFGGGTKLTVLHHHHHH

SEQ ID NO: 2760 - protein, 517 aa, Artificial Sequence
  Synthetic Polypeptide
MALPVTALLLPLALLLHAARPEIVMTQSPATLSLSPGERATLSCRASQDISKYLNWYQQKPGQAPRLLIYHTSRLHSGIPARFSGSGSGTDYTLTISSLQPEDFAVYFCQQGNTLPYTFGQGTKLEIKGGGGSGGGGSGGGGSQVQLQESGPGLVKPSETLSLTCTVSGVSLPDYGVSWIRQPPGKGLEWIGVIWGSETTYYQSSLKSRVTISKDNSKNQVSLKLSSVTAADTAVYYCAKHYYYGGSYAMDYWGQGTLVTVSSTRTRGGGGSEVQLVQSGAEVKKPGESLRISCKGSGYSFSTYWISWVRQMPGKGLEWMGKIYPGDSYTNYSPSFQGQVTISADKSISTAYLQWSSLKASDTAMYYCARGYGIFDYWGQGTLVTVSSGGGGSGGGGSGGGGSSYELTQPPSVSVSPGQTASITCSGDNIGDQYAHWYQQKPGQSPVLVIYQDKNRPSGIPERFSGSNSGNTATLTISGTQAMDEADYYCATYTGFGSLAVFGGGTKLTVLHHHHHH

SEQ ID NO: 2761 - protein, 518 aa, Artificial Sequence
  Synthetic Polypeptide
MALPVTALLLPLALLLHAARPDEIVLTQSPATLSLSPGERATLSCSASSSVSYMHWYQQKPGQAPRLLIYDTSKLASGIPARFSGSGSGTDFTLTISSLEPEDVAVYYCFQGSVYPFTFGQGTKLEIKRGGGGSGGGGSGGGGSQVQLQESGPGLVKPSQTLSLTCTVSGGSISTSGMGVGWIRQHPGKGLEWIGHIWWDDDKRYNPALKSRVTISVDTSKNQFSLKLSSVTAADTAVYYCARMELWSYYFDYWGQGTLVTVSSTRTRGGGGSEVQLVQSGAEVKKPGESLRISCKGSGYSFSTYWISWVRQMPGKGLEWMGKIYPGDSYTNYSPSFQGQVTISADKSISTAYLQWSSLKASDTAMYYCARGYGIFDYWGQGTLVTVSSGGGGSGGGGSGGGGSSYELTQPPSVSVSPGQTASITCSGDNIGDQYAHWYQQKPGQSPVLVIYQDKNRPSGIPERFSGSNSGNTATLTISGTQAMDEADYYCATYTGFGSLAVFGGGTKLTVLHHHHHH

SEQ ID NO: 2762 - protein, 525 aa, Artificial Sequence
  Synthetic Polypeptide
MALPVTALLLPLALLLHAARPDIQLTQSPASLAVSLGQRATISCKASQSVDYDGDSYLNWYQQIPGQPPKLLIYDASNLVSGIPPRFSGSGSGTDFTLNIHPVEKVDAATYHCQQSTEDPWTFGGGTKLEIKGGGGSGGGGSGGGGSQVQLQQSGAELVRPGSSVKISCKASGYAFSSYWMNWVKQRPGQGLEWIGQIWPGDGDTNYNGKFKGKATLTADESSSTAYMQLSSLASEDSAVYFCARRETTTVGRYYYAMDYWGQGTTVTVSSTRTRGGGGSEVQLVQSGAEVKKPGESLRISCKGSGYSFSTYWISWVRQMPGKGLEWMGKIYPGDSYTNYSPSFQGQVTISADKSISTAYLQWSSLKASDTAMYYCARGYGIFDYWGQGTLVTVSSGGGGSGGGGSGGGGSSYELTQPPSVSVSPGQTASITCSGDNIGDQYAHWYQQKPGQSPVLVIYQDKNRPSGIPERFSGSNSGNTATLTISGTQAMDEADYYCATYTGFGSLAVFGGGTKLTVLHHHHHH

SEQ ID NO: 2763 - protein, 542 aa, Artificial Sequence
  Synthetic Polypeptide
MALPVTALLLPLALLLHAARPINIYNAEPANPSEKNSPEFDIVMTQSPATLSLSPGERATLSCRSSKSLQNVNGNTYLYWFQQKPGQSPQLLIYRMSNLNSGVPDRFSGSGSGTEFTLTISSLEPEDFAVYYCMQHLEYPITFGAGTKLEIKGGGGSGGGGSGGGGSEVQLVESGGGLVKPGGSLKLSCAASGYTFTSYVMHWVRQAPGKGLEWIGYINPYNDGTKYNEKFQGRVTISSDKSISTAYMELSSLRSEDTAMYYCARGTYYYGTRVFDYWGQGTLVTVSSTRTRGGGGSEVQLVQSGAEVKKPGESLRISCKGSGYSFSTYWISWVRQMPGKGLEWMGKIYPGDSYTNYSPSFQGQVTISADKSISTAYLQWSSLKASDTAMYYCARGYGIFDYWGQGTLVTVSSGGGGSGGGGSGGGGSSYELTQPPSVSVSPGQTASITCSGDNIGDQYAHWYQQKPGQSPVLVIYQDKNRPSGIPERFSGSNSGNTATLTISGTQAMDEADYYCATYTGFGSLAVFGGGTKLTVLHHHHHH

SEQ ID NO: 2764 - protein, 519 aa, Artificial Sequence
  Synthetic Polypeptide
MALPVTALLLPLALLLHAARPDIQMTQSPSSLSASVGDRVTITCKASDHINNWLAWYQQKPGQAPKLLIYGATTLETGVPSRFSGSGSGTDYTLTISSLQPEDFATYYCQQSWNTPWTFGQGTKLEIKRGGGGSGGGGSGGGGSQVQLQQPGAELVKPGASVKMSCKASGYAFSSYWINWMKQKPGQGLEWIGQIYPGDGDTNYNGKFKGRATLTADTSSSTAYMQLSSLTSEDSAVYFCARSITTVVGCAMDYWGQGTSVTVSSTRTRGGGGSEVQLVQSGAEVKKPGESLRISCKGSGYSFSTYWISWVRQMPGKGLEWMGKIYPGDSYTNYSPSFQGQVTISADKSISTAYLQWSSLKASDTAMYYCARGYGIFDYWGQGTLVTVSSGGGGSGGGGSGGGGSSYELTQPPSVSVSPGQTASITCSGDNIGDQYAHWYQQKPGQSPVLVIYQDKNRPSGIPERFSGSNSGNTATLTISGTQAMDEADYYCATYTGFGSLAVFGGGTKLTVLHHHHHH

SEQ ID NO: 2765 - protein, 519 aa, Artificial Sequence
  Synthetic Polypeptide
MALPVTALLLPLALLLHAARPDIQMTQSPSSLSASVGDRVTITCSASQDISNYLNWYQQKPGKAPKLLIYYTSNLHSGVPSRFSGSGSGTDFTLTISSLQPEDFATYYCQQYRKLPWTFGQGTKLEIKRGGGGSGGGGSGGGGSQVQLVQSGAEVKKPGSSVKVSCKASGGTFSNYWMHWVRQAPGQGLEWMGATYRGHSDTYYNQKFKGRVTITADKSTSTAYMELSSLRSEDTAVYYCARGAIYDGYDVLDNWGQGTLVTVSSTRTRGGGGSEVQLVQSGAEVKKPGESLRISCKGSGYSFSTYWISWVRQMPGKGLEWMGKIYPGDSYTNYSPSFQGQVTISADKSISTAYLQWSSLKASDTAMYYCARGYGIFDYWGQGTLVTVSSGGGGSGGGGSGGGGSSYELTQPPSVSVSPGQTASITCSGDNIGDQYAHWYQQKPGQSPVLVIYQDKNRPSGIPERFSGSNSGNTATLTISGTQAMDEADYYCATYTGFGSLAVFGGGTKLTVLHHHHHH

SEQ ID NO: 2766 - protein, 519 aa, Artificial Sequence
  Synthetic Polypeptide
MALPVTALLLPLALLLHAARPDIVLTQSPATLSLSPGDRATISCRASESVTILGSHLIYWYQQKPGQPPRLLIQLASNVQTGVPARFSGSGSRTDFTLTISSVEPEDFAVYYCLQSRTIPRTFGQGTKLEIKRGGGGSGGGGSGGGGSQVQLVQSGPEVKKPGESVKISCKASGYTFRHYSMNWVKQAPGQGLKWMGRINTESGVPIYADDFKGRFSFTVDTSASTAYLEISSLTSEDTAVYFCSNDYLYSLDFWGQGTTLTVSSTRTRGGGGSEVQLVQSGAEVKKPGESLRISCKGSGYSFSTYWISWVRQMPGKGLEWMGKIYPGDSYTNYSPSFQGQVTISADKSISTAYLQWSSLKASDTAMYYCARGYGIFDYWGQGTLVTVSSGGGGSGGGGSGGGGSSYELTQPPSVSVSPGQTASITCSGDNIGDQYAHWYQQKPGQSPVLVIYQDKNRPSGIPERFSGSNSGNTATLTISGTQAMDEADYYCATYTGFGSLAVFGGGTKLTVLHHHHHH

SEQ ID NO: 2767 - protein, 518 aa, Artificial Sequence
  Synthetic Polypeptide
MALPVTALLLPLALLLHAARPDIVLTQSPASLAVSLGERATINCRASESVSVIGAHLIHWYQQKPGQPPKLLIYLASNLETGVPARFSGSGSGTDFTLTISSLQAEDAAIYYCLQSRIFPRTFGQGTKLEIKGGGGSGGGGSGGGGSQVQLVQSGSELKKPGESVKISCKASGYTFTDYSINWVKQAPGQGLKWMGWINTETREPAYAYDFRGRFVFSLDTSASTAYLQISSLKAEDTAVYFCALDYSYAMDYWGQGTLVTVSSTRTRGGGGSEVQLVQSGAEVKKPGESLRISCKGSGYSFSTYWISWVRQMPGKGLEWMGKIYPGDSYTNYSPSFQGQVTISADKSISTAYLQWSSLKASDTAMYYCARGYGIFDYWGQGTLVTVSSGGGGSGGGGSGGGGSSYELTQPPSVSVSPGQTASITCSGDNIGDQYAHWYQQKPGQSPVLVIYQDKNRPSGIPERFSGSNSGNTATLTISGTQAMDEADYYCATYTGFGSLAVFGGGTKLTVLHHHHHH

SEQ ID NO: 2768 - protein, 519 aa, Artificial Sequence
  Synthetic Polypeptide
MALPVTALLLPLALLLHAARPDIVLTQSPATLSLSPGDRATLSCRASESVTILGSHLIYWYQQKPGQAPRLLIQLASNVQTGIPARFSGSGSRTDFTLTISSLEPEDFAVYYCLQSRTIPRTFGQGTKLEIKRGGGGSGGGGSGGGGSQVQLVQSGSELKKPGESVKISCKASGYTFTHYSMNWVRQAPGQGLEWMGRINTETGEPLYADDFKGRFVFSLDTSASTAYLQISSLKAEDTAVYYCSNDYLYSLDYWGQGTLVTVSSTRTRGGGGSEVQLVQSGAEVKKPGESLRISCKGSGYSFSTYWISWVRQMPGKGLEWMGKIYPGDSYTNYSPSFQGQVTISADKSISTAYLQWSSLKASDTAMYYCARGYGIFDYWGQGTLVTVSSGGGGSGGGGSGGGGSSYELTQPPSVSVSPGQTASITCSGDNIGDQYAHWYQQKPGQSPVLVIYQDKNRPSGIPERFSGSNSGNTATLTISGTQAMDEADYYCATYTGFGSLAVFGGGTKLTVLHHHHHH

SEQ ID NO: 2769 - protein, 520 aa, Artificial Sequence
  Synthetic Polypeptide
MALPVTALLLPLALLLHAARPDEIVLTQSPATLSLSPGERATLSCRASQSVSSYLAWYQQKPGQAPRLLIYDASNRATGIPARFSGSGSGTDFTLTISSLEPEDFAVYYCQQRSNWPITFGQGTRLEIKGGGGSGGGGSGGGGSEVQLVESGGGLVQPGRSLRLSCAASGFTFNDYAMHWVRQAPGKGLEWVSTISWNSGSIGYADSVKGRFTISRDNAKKSLYLQMNSLRAEDTALYYCAKDIQYGNYYYGMDVWGQGTTVTVSSTRTRGGGGSEVQLVQSGAEVKKPGESLRISCKGSGYSFSTYWISWVRQMPGKGLEWMGKIYPGDSYTNYSPSFQGQVTISADKSISTAYLQWSSLKASDTAMYYCARGYGIFDYWGQGTLVTVSSGGGGSGGGGSGGGGSSYELTQPPSVSVSPGQTASITCSGDNIGDQYAHWYQQKPGQSPVLVIYQDKNRPSGIPERFSGSNSGNTATLTISGTQAMDEADYYCATYTGFGSLAVFGGGTKLTVLHHHHHH

SEQ ID NO: 2770 - protein, 522 aa, Artificial Sequence
  Synthetic Polypeptide
MALPVTALLLPLALLLHAARPDIVMTQTPLSLPVTPGEPASISCRSSKSLLHSNGITYLYWYLQKPGQSPQLLIYQMSNLVSGVPDRFSGSGSGTDFTLKISRVEAEDVGVYYCAQNLELPYTFGGGTKVEIKRGGGGSGGGGSGGGGSQVQLVQSGAEVKKPGSSVKVSCKASGYAFSYSWINWVRQAPGQGLEWMGRIFPGDGDTDYNGKFKGRVTITADKSTSTAYMELSSLRSEDTAVYYCARNVFDGYWLVYWGQGTLVTVSSTRTRGGGGSEVQLVQSGAEVKKPGESLRISCKGSGYSFSTYWISWVRQMPGKGLEWMGKIYPGDSYTNYSPSFQGQVTISADKSISTAYLQWSSLKASDTAMYYCARGYGIFDYWGQGTLVTVSSGGGGSGGGGSGGGGSSYELTQPPSVSVSPGQTASITCSGDNIGDQYAHWYQQKPGQSPVLVIYQDKNRPSGIPERFSGSNSGNTATLTISGTQAMDEADYYCATYTGFGSLAVFGGGTKLTVLHHHHHH

SEQ ID NO: 2771 - protein, 519 aa, Artificial Sequence
  Synthetic Polypeptide
MALPVTALLLPLALLLHAARPDIQMTQSPSSLSASVGDRVTITCRASSSVSYMHWYQQKPGKAPKPLIYAPSNLASGVPSRFSGSGSGTDFTLTISSLQPEDFATYYCQQWSFNPPTFGQGTKVEIKRGGGGSGGGGSGGGGSEVQLVESGGGLVQPGGSLRLSCAASGYTFTSYNMHWVRQAPGKGLEWVGAIYPGNGDTSYNQKFKGRFTISVDKSKNTLYLQMNSLRAEDTAVYYCARVVYYSNSYWYFDVWGQGTLVTVSSTRTRGGGGSEVQLVQSGAEVKKPGESLRISCKGSGYSFSTYWISWVRQMPGKGLEWMGKIYPGDSYTNYSPSFQGQVTISADKSISTAYLQWSSLKASDTAMYYCARGYGIFDYWGQGTLVTVSSGGGGSGGGGSGGGGSSYELTQPPSVSVSPGQTASITCSGDNIGDQYAHWYQQKPGQSPVLVIYQDKNRPSGIPERFSGSNSGNTATLTISGTQAMDEADYYCATYTGFGSLAVFGGGTKLTVLHHHHHH

SEQ ID NO: 2772 - protein, 521 aa, Artificial Sequence
  Synthetic Polypeptide
MALPVTALLLPLALLLHAARPQIVLSQSPAILSASPGEKVTMTCRASSSVSYMHWYQQKPGSSPKPWIYATSNLASGVPARFSGSGSGTSYSFTISRVEAEDAATYYCQQWTFNPPTFGGGTRLEIKRTVAAGGGGSGGGGSGGGGSQAYLQQSGAELVRPGASVKMSCKASGYTFTSYNMHWVKQTPRQGLEWIGGIYPGNGDTSYNQKFKGKATLTVGKSSSTAYMQLSSLTSEDSAVYFCARYDYNYAMDYWGQGTSVTVSSASTRTRGGGGSEVQLVQSGAEVKKPGESLRISCKGSGYSFSTYWISWVRQMPGKGLEWMGKIYPGDSYTNYSPSFQGQVTISADKSISTAYLQWSSLKASDTAMYYCARGYGIFDYWGQGTLVTVSSGGGGSGGGGSGGGGSSYELTQPPSVSVSPGQTASITCSGDNIGDQYAHWYQQKPGQSPVLVIYQDKNRPSGIPERFSGSNSGNTATLTISGTQAMDEADYYCATYTGFGSLAVFGGGTKLTVLHHHHHH

SEQ ID NO: 2773 - protein, 519 aa, Artificial Sequence; identical to SEQ ID NO: 2771
  Synthetic Polypeptide

SEQ ID NO: 2774 - protein, 520 aa, Artificial Sequence
  Synthetic Polypeptide
MALPVTALLLPLALLLHAARPDEIVLTQSPATLSLSPGERATLSCRASQSVSSYLAWYQQKPGQAPRLLIYDASNRATGIPARFSGSGSGTDFTLTISSLEPEDFAVYYCQQRSNWPITFGQGTRLEIKGGGGSGGGGSGGGGSEVQLVESGGGLVQPDRSLRLSCAASGFTFHDYAMHWVRQAPGKGLEWVSTISWNSGTIGYADSVKGRFTISRDNAKNSLYLQMNSLRAEDTALYYCAKDIQYGNYYYGMDVWGQGTTVTVSSTRTRGGGGSEVQLVQSGAEVKKPGESLRISCKGSGYSFSTYWISWVRQMPGKGLEWMGKIYPGDSYTNYSPSFQGQVTISADKSISTAYLQWSSLKASDTAMYYCARGYGIFDYWGQGTLVTVSSGGGGSGGGGSGGGGSSYELTQPPSVSVSPGQTASITCSGDNIGDQYAHWYQQKPGQSPVLVIYQDKNRPSGIPERFSGSNSGNTATLTISGTQAMDEADYYCATYTGFGSLAVFGGGTKLTVLHHHHHH

SEQ ID NO: 2775 - protein, 523 aa, Artificial Sequence
  Synthetic Polypeptide
MALPVTALLLPLALLLHAARPDIQMTQSPSSLSASVGDRVTITCRSSQSIVHSVGNTFLEWYQQKPGKAPKLLIYKVSNRFSGVPSRFSGSGSGTDFTLTISSLQPEDFATYYCFQGSQFPYTFGQGTKVEIKRGGGGSGGGGSGGGGSEVQLVESGGGLVQPGGSLRLSCAASGYEFSRSWMNWVRQAPGKGLEWVGRIYPGDGDTNYSGKFKGRFTISADTSKNTAYLQMNSLRAEDTAVYYCARDGSSWDWYFDVWGQGTLVTVSSTRTRGGGGSEVQLVQSGAEVKKPGESLRISCKGSGYSFSTYWISWVRQMPGKGLEWMGKIYPGDSYTNYSPSFQGQVTISADKSISTAYLQWSSLKASDTAMYYCARGYGIFDYWGQGTLVTVSSGGGGSGGGGSGGGGSSYELTQPPSVSVSPGQTASITCSGDNIGDQYAHWYQQKPGQSPVLVIYQDKNRPSGIPERFSGSNSGNTATLTISGTQAMDEADYYCATYTGFGSLAVFGGGTKLTVLHHHHHH

SEQ ID NO: 2776 - protein, 515 aa, Artificial Sequence
  Synthetic Polypeptide
MALPVTALLLPLALLLHAARPDIVMTQSPSSLSASVGDRVTITCKASQSVTNDVAWYQQKPGKAPKLLIYYASNRYTGVPSRFSGSGSGTDFTLTISSLQPEDFATYYCQQDYRSPWTFGGGTKVEIKRGGGGSGGGGSGGGGSQVQLEESGGGVVRPGRSLRLSCAASGFTFSDYGVNWIRQAPGKGLEWVTIIWGDGRTDYNSALKSRFTVSRNNSNNTLSLQMNSLTTEDTAVYYCVRAPGNRAMEYWGQGVLVTVSSTRTRGGGGSEVQLVQSGAEVKKPGESLRISCKGSGYSFSTYWISWVRQMPGKGLEWMGKIYPGDSYTNYSPSFQGQVTISADKSISTAYLQWSSLKASDTAMYYCARGYGIFDYWGQGTLVTVSSGGGGSGGGGSGGGGSSYELTQPPSVSVSPGQTASITCSGDNIGDQYAHWYQQKPGQSPVLVIYQDKNRPSGIPERFSGSNSGNTATLTISGTQAMDEADYYCATYTGFGSLAVFGGGTKLTVLHHHHHH

SEQ ID NO: 2777 - protein, 521 aa, Artificial Sequence
  Synthetic Polypeptide
MALPVTALLLPLALLLHAARPQVQLQQSGPGLVKPSQTLSLTCAISGDSVSSNSAAWNWIRQSPSRGLEWLGRTYYRSKWYNDYAVSVKSRITINPDTSKNQFSLQLNSVTPEDTAVYYCAREVTGDLEDAFDIWGQGTMVTVSSGGGGSGGGGSGGGGSDIQMTQSPSSLSASVGDRVTITCRASQTIWSYLNWYQQRPGKAPNLLIYAASSLQSGVPSRFSGRGSGTDFTLTISSLQAEDFATYYCQQSYSIPQIFGQGTKLEIKTRTRGGGGSEVQLVQSGAEVKKPGESLRISCKGSGYSFSTYWISWVRQMPGKGLEWMGKIYPGDSYTNYSPSFQGQVTISADKSISTAYLQWSSLKASDTAMYYCARGYGIFDYWGQGTLVTVSSGGGGSGGGGSGGGGSSYELTQPPSVSVSPGQTASITCSGDNIGDQYAHWYQQKPGQSPVLVIYQDKNRPSGIPERFSGSNSGNTATLTISGTQAMDEADYYCATYTGFGSLAVFGGGTKLTVLHHHHHH

SEQ ID NO: 2778 - protein, 520 aa, Artificial Sequence
  Synthetic Polypeptide
MALPVTALLLPLALLLHAARPEVQLVESGGGLVQPGRSLRLSCAASGFTFDDYAMHWVRQAPGKGLEWVSGISWNSGSIGYADSVKGRFTISRDNAKNSLYLQMNSLRAEDTALYYCAKDKGGGYYDFWSGSDYWGQGTLVTVSSGGGGSGGGGSGGGGSSSELTQDPAVSVALGQTVRITCQGDSLRSYYASWYQQKPGQAPVLVIYGKNNRPSGIPDRFSGSSSGNTASLTITGAQAEDEADYYCNSRDSSGWVFGGGTKLTVLTRTRGGGGSEVQLVQSGAEVKKPGESLRISCKGSGYSFSTYWISWVRQMPGKGLEWMGKIYPGDSYTNYSPSFQGQVTISADKSISTAYLQWSSLKASDTAMYYCARGYGIFDYWGQGTLVTVSSGGGGSGGGGSGGGGSSYELTQPPSVSVSPGQTASITCSGDNIGDQYAHWYQQKPGQSPVLVIYQDKNRPSGIPERFSGSNSGNTATLTISGTQAMDEADYYCATYTGFGSLAVFGGGTKLTVLHHHHHH

SEQ ID NO: 2779 - protein, 529 aa, Artificial Sequence
  Synthetic Polypeptide
MALPVTALLLPLALLLHAARPEVQLQQSGPGLVKPSQTLSLTCAISGDSVLSNSDTWNWIRQSPSRGLEWLGRTYHRSTWYDDYASSVRGRVSINVDTSKNQYSLQLNAVTPEDTGVYYCARDRLQDGNSWSDAFDVWGQGTMVTVSSGGGGSGGGGSGGGGSQSALTQPASVSGSPGQSITISCTGTSSDVGGYNYVSWYQQHPGKAPKLMIYDVSNRPSGVSNRFSGSKSGNTASLTISGLQAEDEADYYCSSYTSSSTLVYVFGTGTKVTVLTRTRGGGGSEVQLVQSGAEVKKPGESLRISCKGSGYSFSTYWISWVRQMPGKGLEWMGKIYPGDSYTNYSPSFQGQVTISADKSISTAYLQWSSLKASDTAMYYCARGYGIFDYWGQGTLVTVSSGGGGSGGGGSGGGGSSYELTQPPSVSVSPGQTASITCSGDNIGDQYAHWYQQKPGQSPVLVIYQDKNRPSGIPERFSGSNSGNTATLTISGTQAMDEADYYCATYTGFGSLAVFGGGTKLTVLHHHHHH

SEQ ID NO: 2780 - protein, 521 aa, Artificial Sequence
  Synthetic Polypeptide
MALPVTALLLPLALLLHAARPDDIQMTQTTSSLSASLGDRVTISCRASQDISNYLNWYQQKPDGTVKLLIYYTSILHSGVPSRFSGSGSGTDYSLTISNLEQEDFATYFCQQGNTLPWTFGGGTKLEIKAGGGGSGGGGSGGGGSEVQLVESGGGLVKPGGSLKLSCAASGFAFSIYDMSWVRQTPEKRLEWVAYISSGGGTYYPDTVKGRFTISRDNAKNTLYLQMSSLKSEDTAMYYCARHSGYGTHWGVLFAYWGQGTLVTVSATRTRGGGGSEVQLVQSGAEVKKPGESLRISCKGSGYSFSTYWISWVRQMPGKGLEWMGKIYPGDSYTNYSPSFQGQVTISADKSISTAYLQWSSLKASDTAMYYCARGYGIFDYWGQGTLVTVSSGGGGSGGGGSGGGGSSYELTQPPSVSVSPGQTASITCSGDNIGDQYAHWYQQKPGQSPVLVIYQDKNRPSGIPERFSGSNSGNTATLTISGTQAMDEADYYCATYTGFGSLAVFGGGTKLTVLHHHHHH

SEQ ID NO: 2781 - protein, 514 aa, Artificial Sequence
  Synthetic Polypeptide
MALPVTALLLPLALLLHAARPDIQMTQSPATIENTSLSASVGDRVTITCRASQGISSWLTWYQQKPEKAPKSLIYAASSLQSGVPSRFSGSGSGTDFTLTISSLQPEDFATYYCQQYDSYPITFGQGTRLEIKGGGGSGGGGSGGGGSQVQLQQWGAGLLKPSETLSLTCAVYGGSFSAYYWSWIRQPPGKGLEWIGDINHGGGTNYNPSLKSRVTISVDTSKNQFSLKLNSVTAADTAVYYCASLTAYWGQGSLVTVSSTRTRGGGGSEVQLVQSGAEVKKPGESLRISCKGSGYSFSTYWISWVRQMPGKGLEWMGKIYPGDSYTNYSPSFQGQVTISADKSISTAYLQWSSLKASDTAMYYCARGYGIFDYWGQGTLVTVSSGGGGSGGGGSGGGGSSYELTQPPSVSVSPGQTASITCSGDNIGDQYAHWYQQKPGQSPVLVIYQDKNRPSGIPERFSGSNSGNTATLTISGTQAMDEADYYCATYTGFGSLAVFGGGTKLTVLHHHHHH

SEQ ID NO: 2782 - protein, 519 aa, Artificial Sequence
  Synthetic Polypeptide
MALPVTALLLPLALLLHAARPDEIVLTQSPDSLAVSLGERATINCKASQSVDFDGDSYLNWYQQKPGQPPKVLIYAASTLQSGVPSRFSGSGSGTDFTLTINSLEAEDAATYYCQQSNEDPWTFGGGTKVEIKGGGGSGGGGSGGGGSQVQLVQSGAEVKKPGASVKVSCKVSGYTFTDYYITWVRQAPGQALEWMGWIYPGSGNTKYSQKFQGRFVFSVDTSASTAYLQLSSLKAEDTAVYYCANYGNYWFAYWGQGTLVTVSSTRTRGGGGSEVQLVQSGAEVKKPGESLRISCKGSGYSFSTYWISWVRQMPGKGLEWMGKIYPGDSYTNYSPSFQGQVTISADKSISTAYLQWSSLKASDTAMYYCARGYGIFDYWGQGTLVTVSSGGGGSGGGGSGGGGSSYELTQPPSVSVSPGQTASITCSGDNIGDQYAHWYQQKPGQSPVLVIYQDKNRPSGIPERFSGSNSGNTATLTISGTQAMDEADYYCATYTGFGSLAVFGGGTKLTVLHHHHHH

SEQ ID NO: 2783 - protein, 516 aa, Artificial Sequence
  Synthetic Polypeptide
MALPVTALLLPLALLLHAARPDIQMTQSPSSLSASVGDRVTITCRASQGISSWLAWYQQKPEKAPKSLIYAASSLQSGVPSRFSGSGSGTDFTLTISSLQPEDFATYYCQQYNSYPPTFGGGTKVEIKGGGGSGGGGSGGGGSEVQLVQSGGGLVHPGGSLRLSCAGSGFAFSSSTMHWIRQAPGKGLEWISLIGSGGGIYYGDSVKGRFTISRDNAKNSLYLQMNSLRAEDMAVYYCVRGYFDWVDYFDYWGQGTLVTVSSTRTRGGGGSEVQLVQSGAEVKKPGESLRISCKGSGYSFSTYWISWVRQMPGKGLEWMGKIYPGDSYTNYSPSFQGQVTISADKSISTAYLQWSSLKASDTAMYYCARGYGIFDYWGQGTLVTVSSGGGGSGGGGSGGGGSSYELTQPPSVSVSPGQTASITCSGDNIGDQYAHWYQQKPGQSPVLVIYQDKNRPSGIPERFSGSNSGNTATLTISGTQAMDEADYYCATYTGFGSLAVFGGGTKLTVLHHHHHH

SEQ ID NO: 2784 - protein, 526 aa, Artificial Sequence
  Synthetic Polypeptide
MALPVTALLLPLALLLHAARPDDIVMTQSPDSLTVSLGERTTINCKSSQSVLDSSKNKNSLAWYQQKPGQPPKLLLSWASTRESGIPDRFSGSGSGTDFTLTIDSLQPEDSATYYCQQSAHFPITFGQGTRLEIKGGGGSGGGGSGGGGSQVQLVQSGAEVKKPGASVKVSCKASGYTFTNYGMNWVKQAPGQGLKWMGWINTYTGEPTYADDFKGRVTMTSDTSTSTAYLELHNLRSDDTAVYYCARWSWSDGYYVYFDYWGQGTTVTVSSTRTRGGGGSEVQLVQSGAEVKKPGESLRISCKGSGYSFSTYWISWVRQMPGKGLEWMGKIYPGDSYTNYSPSFQGQVTISADKSISTAYLQWSSLKASDTAMYYCARGYGIFDYWGQGTLVTVSSGGGGSGGGGSGGGGSSYELTQPPSVSVSPGQTASITCSGDNIGDQYAHWYQQKPGQSPVLVIYQDKNRPSGIPERFSGSNSGNTATLTISGTQAMDEADYYCATYTGFGSLAVFGGGTKLTVLHHHHHH

SEQ ID NO: 2785 - protein, 522 aa, Artificial Sequence
  Synthetic Polypeptide
MALPVTALLLPLALLLHAARPDEIVLTQSPGSLAVSPGERVTMSCKSSQSVFFSSSQKNYLAWYQQIPGQSPRLLIYWASTRESGVPDRFTGSGSGTDFTLTISSVQPEDLAIYYCHQYLSSRTFGQGTKLEIKRGGGGSGGGGSGGGGSQVQLQQPGAEVVKPGASVKMSCKASGYTFTSYYIHWIKQTPGQGLEWVGVIYPGNDDISYNQKFQGKATLTADKSSTTAYMQLSSLTSEDSAVYYCAREVRLRYFDVWGQGTTVTVSSTRTRGGGGSEVQLVQSGAEVKKPGESLRISCKGSGYSFSTYWISWVRQMPGKGLEWMGKIYPGDSYTNYSPSFQGQVTISADKSISTAYLQWSSLKASDTAMYYCARGYGIFDYWGQGTLVTVSSGGGGSGGGGSGGGGSSYELTQPPSVSVSPGQTASITCSGDNIGDQYAHWYQQKPGQSPVLVIYQDKNRPSGIPERFSGSNSGNTATLTISGTQAMDEADYYCATYTGFGSLAVFGGGTKLTVLHHHHHH

SEQ ID NO: 2786 - protein, 547 aa, Artificial Sequence
  Synthetic Polypeptide
MALPVTALLLPLALLLHAARPYINIYNAEPANPSEKNSPTQYAYGSGEFDIVMTQSPSSLSASLGGKVTITCKASQDINKYIAWYQHKPGKGPRLLIHYTSTLQPGIPSRFSGSGSGRDYSFSISNLEPEDIATYYCLQYDNLLTFGAGTKLELKRGGGGSGGGGSGGGGSEVKLQQSGPELVKPGTSVKVSCKASGYSFTDYNMYWVKQSHGKSLEWIGYIDPYKGGTIYNQKFKGKATLTVDKSSSTAFMHLNSLTSEDSAVYYCAREMITAYYFDYWGQGSSVTVSSLERTRTRGGGGSEVQLVQSGAEVKKPGESLRISCKGSGYSFSTYWISWVRQMPGKGLEWMGKIYPGDSYTNYSPSFQGQVTISADKSISTAYLQWSSLKASDTAMYYCARGYGIFDYWGQGTLVTVSSGGGGSGGGGSGGGGSSYELTQPPSVSVSPGQTASITCSGDNIGDQYAHWYQQKPGQSPVLVIYQDKNRPSGIPERFSGSNSGNTATLTISGTQAMDEADYYCATYTGFGSLAVFGGGTKLTVLHHHHHH

SEQ ID NO: 2787 - protein, 563 aa, Artificial Sequence
  Synthetic Polypeptide
MALPVTALLLPLALLLHAARPDIQMTQSPSSLSASVGDRVTINCKASQDINSYLSWFQQKPGKAPKTLIYRANRLVDGVPSRFSGSGSGQDYTLTISSLQPEDFATYYCLQYDEFPLTFGGGTKVEIKGGGGSGGGGSGGGGSQVQLVQSGAEVKKPGASVKVSCKASGYTFTNYDINWVRQAPGQGLEWIGWIYPGDGSTKYNEKFKAKATLTADTSTSTAYMELRSLRSDDTAVYYCASGYEDAMDYWGQGTTVTVSSAKPTTTPAPRPPTPAPTIASQPLSLRPEACRPAAGGAVHTRGLDFACDITRTRGGGGSEVQLVQSGAEVKKPGESLRISCKGSGYSFSTYWISWVRQMPGKGLEWMGKIYPGDSYTNYSPSFQGQVTISADKSISTAYLQWSSLKASDTAMYYCARGYGIFDYWGQGTLVTVSSGGGGSGGGGSGGGGSSYELTQPPSVSVSPGQTASITCSGDNIGDQYAHWYQQKPGQSPVLVIYQDKNRPSGIPERFSGSNSGNTATLTISGTQAMDEADYYCATYTGFGSLAVFGGGTKLTVLHHHHHH

SEQ ID NO: 2788 - protein, 519 aa, Artificial Sequence
  Synthetic Polypeptide
MALPVTALLLPLALLLHAARPEIVLTQSPLSLPVTPGEPASISCRSSQSLLHSNGYNYLDWYLQKPGQSPQLLIYLGVNSVSGVPDRFSGSGSGTDFTLKISRVEAEDVGVYYCMQALQTPWTFGQGTKVEIKGGGGSGGGGSGGGGSQVQLVQSGAEVKKPGSSVKVSCKASGGIFSNHAISWVRQAPGQGLEWMGGIIPIFGTANYAQKFQGRVTITADESTSTAFMELSSLRSEDTAVYYCAREWADVFDIWGQGTMVTVSSTRTRGGGGSEVQLVQSGAEVKKPGESLRISCKGSGYSFSTYWISWVRQMPGKGLEWMGKIYPGDSYTNYSPSFQGQVTISADKSISTAYLQWSSLKASDTAMYYCARGYGIFDYWGQGTLVTVSSGGGGSGGGGSGGGGSSYELTQPPSVSVSPGQTASITCSGDNIGDQYAHWYQQKPGQSPVLVIYQDKNRPSGIPERFSGSNSGNTATLTISGTQAMDEADYYCATYTGFGSLAVFGGGTKLTVLHHHHHH

SEQ ID NO: 2789 - protein, 518 aa, Artificial Sequence
  Synthetic Polypeptide
MALPVTALLLPLALLLHAARPDIQMTQSPASLTVSLGQRATISCRASESVDSYGNSYLHWYQQKPGQPPQLLIYLASNLESGVPARFSGSGSRTDFTLTIDPVEADDAATYYCQQNNEDPWTFGGGTKVEIKGGGGSGGGGSGGGGSEVQLQQSGAELVKPGASVKMSCKAFGYTFTTFPIEWMKQSHGKSLEWIGNFHPYNDQTKYNEEFKGRAKLTIDRSSSTVYLELGRLTSDDSAVYYCARGYYYAFDFWGQGTTLTVSSTRTRGGGGSEVQLVQSGAEVKKPGESLRISCKGSGYSFSTYWISWVRQMPGKGLEWMGKIYPGDSYTNYSPSFQGQVTISADKSISTAYLQWSSLKASDTAMYYCARGYGIFDYWGQGTLVTVSSGGGGSGGGGSGGGGSSYELTQPPSVSVSPGQTASITCSGDNIGDQYAHWYQQKPGQSPVLVIYQDKNRPSGIPERFSGSNSGNTATLTISGTQAMDEADYYCATYTGFGSLAVFGGGTKLTVLHHHHHH

SEQ ID NO: 2790 - protein, 524 aa, Artificial Sequence
  Synthetic Polypeptide
MALPVTALLLPLALLLHAARPDIVMTQSPDSLAVSLGERATINCESSQSLLNSGNQKNYLTWYQQKPGQPPKPLIYWASTRESGVPDRFSGSGSGTDFTLTISSLQAEDVAVYYCQNDYSYPYTFGQGTKLEIKRGGGGSGGGGSGGGGSEVQLVQSGAEVKKPGESLKISCKGSGYSFTDYYMKWARQMPGKGLEWMGDIIPSNGATFYNQKFKGQVTISADKSISTTYLQWSSLKASDTAMYYCARSHLLRASWFAYWGQGTMVTVSSTRTRGGGGSEVQLVQSGAEVKKPGESLRISCKGSGYSFSTYWISWVRQMPGKGLEWMGKIYPGDSYTNYSPSFQGQVTISADKSISTAYLQWSSLKASDTAMYYCARGYGIFDYWGQGTLVTVSSGGGGSGGGGSGGGGSSYELTQPPSVSVSPGQTASITCSGDNIGDQYAHWYQQKPGQSPVLVIYQDKNRPSGIPERFSGSNSGNTATLTISGTQAMDEADYYCATYTGFGSLAVFGGGTKLTVLHHHHHH

SEQ ID NO: 2791 - protein, 519 aa, Artificial Sequence
  Synthetic Polypeptide
MALPVTALLLPLALLLHAARPDIVLTQSPASLAVSLGQRATISCRASESVDNYGNTFMHWYQQKPGQPPKLLIYRASNLESGIPARFSGSGSRTDFTLTINPVEADDVATYYCQQSNEDPPTFGAGTKLELKGGGGSGGGGSGGGGSQIQLVQSGPELKKPGETVKISCKASGYIFTNYGMNWVKQAPGKSFKWMGWINTYTGESTYSADFKGRFAFSLETSASTAYLHINDLKNEDTATYFCARSGGYDPMDYWGQGTSVTVSSTRTRGGGGSEVQLVQSGAEVKKPGESLRISCKGSGYSFSTYWISWVRQMPGKGLEWMGKIYPGDSYTNYSPSFQGQVTISADKSISTAYLQWSSLKASDTAMYYCARGYGIFDYWGQGTLVTVSSGGGGSGGGGSGGGGSSYELTQPPSVSVSPGQTASITCSGDNIGDQYAHWYQQKPGQSPVLVIYQDKNRPSGIPERFSGSNSGNTATLTISGTQAMDEADYYCATYTGFGSLAVFGGGTKLTVLHHHHHH

SEQ ID NO: 2792 - protein, 523 aa, Artificial Sequence
  Synthetic Polypeptide
MALPVTALLLPLALLLHAARPDFVMTQSPDSLAVSLGERVTMSCKSSQSLLNSGNQKNYLTWYQQKPGQPPKLLIYWASTRESGVPDRFSGSGSGTDFTLTISSLQAEDVAVYYCQNDYSYPYTFGQGTKLEIKGGGGSGGGGSGGGGSEVQLVQSGAELKKPGASVKVSCKASGYTFTDYYMKWVRQAPGQGLEWIGDIIPSNGATFYNQKFKGRVTITVDKSTSTAYMELSSLRSEDTAVYYCARSHLLRASWFAYWGQGTLVTVSSTRTRGGGGSEVQLVQSGAEVKKPGESLRISCKGSGYSFSTYWISWVRQMPGKGLEWMGKIYPGDSYTNYSPSFQGQVTISADKSISTAYLQWSSLKASDTAMYYCARGYGIFDYWGQGTLVTVSSGGGGSGGGGSGGGGSSYELTQPPSVSVSPGQTASITCSGDNIGDQYAHWYQQKPGQSPVLVIYQDKNRPSGIPERFSGSNSGNTATLTISGTQAMDEADYYCATYTGFGSLAVFGGGTKLTVLHHHHHH

SEQ ID NO: 2793 - protein, 523 aa, Artificial Sequence
  Synthetic Polypeptide
MALPVTALLLPLALLLHAARPDFVMTQSPDSLAVSLGERVTMSCKSSQSLLNSGNQKNYLTWYQQKPGQPPKLLIYWASTRESGVPDRFSGSGSGTDFTLTISSLQAEDVAVYYCQNDYSYPYTFGQGTKLEIKGGGGSGGGGSGGGGSQVQLVQSGAELKKPGASVKVSCKASGYTFTDYYMKWVRQAPGQGLEWIGDIIPSNGATFYNQKFKGRVTITVDKSTSTAYMELSSLRSEDTAVYYCARSHLLRASWFAYWGQGTLVTVSSTRTRGGGGSEVQLVQSGAEVKKPGESLRISCKGSGYSFSTYWISWVRQMPGKGLEWMGKIYPGDSYTNYSPSFQGQVTISADKSISTAYLQWSSLKASDTAMYYCARGYGIFDYWGQGTLVTVSSGGGGSGGGGSGGGGSSYELTQPPSVSVSPGQTASITCSGDNIGDQYAHWYQQKPGQSPVLVIYQDKNRPSGIPERFSGSNSGNTATLTISGTQAMDEADYYCATYTGFGSLAVFGGGTKLTVLHHHHHH

SEQ ID NO: 2794 - protein, 524 aa, Artificial Sequence
  Synthetic Polypeptide
MALPVTALLLPLALLLHAARPDIVMTQSPSSLAVSEGETVTINCKSSQSFLSSGDGKNYVAWYQYKPGQSPKLLIYWASTRQSGVPDRFIGSGSGTDFTLTISTVQAEDLAIYYCQQYYDTPLTFGSGTKLEIKGGGGSGGGGSGGGGSEVKLQESGPSLVQSSQTLSLTCTVSGFSLTSYHIHWVRQTPGKGLEWMGVMWSDGDTSYNSALKSRLSISRDTSQSQVFLKMNSLQTEDTATYYCARGYYSSYLYLWFAYWGQGTLVTVSSTRTRGGGGSEVQLVQSGAEVKKPGESLRISCKGSGYSFSTYWISWVRQMPGKGLEWMGKIYPGDSYTNYSPSFQGQVTISADKSISTAYLQWSSLKASDTAMYYCARGYGIFDYWGQGTLVTVSSGGGGSGGGGSGGGGSSYELTQPPSVSVSPGQTASITCSGDNIGDQYAHWYQQKPGQSPVLVIYQDKNRPSGIPERFSGSNSGNTATLTISGTQAMDEADYYCATYTGFGSLAVFGGGTKLTVLHHHHHH

SEQ ID NO: 2795 - protein, 528 aa, Artificial Sequence
  Synthetic Polypeptide
MALPVTALLLPLALLLHAARPDVLMTQTPVSLPVSLGGQVSISCRSSQSLVHSDGDTYLHWYLQKPGQSPQLLIYRVSNRFSGVPDRFSGSGSGTDFTLKISRVEPEDLGLYYCLQTTHFPPWTFGGGTKLEMKGGGGSGGGGSGGGGSQVQLQQSGPELRRPGSSVRLSCKASGYRIKDFLIHWIKNRPEHGLEWIGWIDPEDGETKYAQKFQTKATLTADTSSNTAYMQLSSLTSEDTATYFCARWGDVYYGLMRGHVMDAWGQGTSVTVSSTRTRGGGGSEVQLVQSGAEVKKPGESLRISCKGSGYSFSTYWISWVRQMPGKGLEWMGKIYPGDSYTNYSPSFQGQVTISADKSISTAYLQWSSLKASDTAMYYCARGYGIFDYWGQGTLVTVSSGGGGSGGGGSGGGGSSYELTQPPSVSVSPGQTASITCSGDNIGDQYAHWYQQKPGQSPVLVIYQDKNRPSGIPERFSGSNSGNTATLTISGTQAMDEADYYCATYTGFGSLAVFGGGTKLTVLHHHHHH

SEQ ID NO: 2796 - protein, 519 aa, Artificial Sequence
  Synthetic Polypeptide
MALPVTALLLPLALLLHAARPDIQMTQSTSSLSASLGDRVTISCSASQGINNYLNWYQQKPDGTVELLIYYTSTLQSGVPSRFSGSGSGTDYSLTISNLEPEDIGTYYCQQYSKLPRTFGGGTKLEIKGGGGSGGGGSGGGGSQVQLQQSGSELMMPGASVKISCKATGYTFSNYWIEWVKQRPGHGLEWIGEILPGTGRTIYNEKFKGKATFTADISSNTVQMQLSSLTSEDSAVYYCARRDYYGNFYYAMDYWGQGTSVTVSSTRTRGGGGSEVQLVQSGAEVKKPGESLRISCKGSGYSFSTYWISWVRQMPGKGLEWMGKIYPGDSYTNYSPSFQGQVTISADKSISTAYLQWSSLKASDTAMYYCARGYGIFDYWGQGTLVTVSSGGGGSGGGGSGGGGSSYELTQPPSVSVSPGQTASITCSGDNIGDQYAHWYQQKPGQSPVLVIYQDKNRPSGIPERFSGSNSGNTATLTISGTQAMDEADYYCATYTGFGSLAVFGGGTKLTVLHHHHHH

SEQ ID NO: 2797 - protein, 516 aa, Artificial Sequence
  Synthetic Polypeptide
MALPVTALLLPLALLLHAARPDIQMTQSPSSLSASVGDRVTITCKASQDVGIAVAWYQQKPGKVPKLLIYWASTRHTGVPDRFSGSGSGTDFTLTISSLQPEDVATYYCQQYSSYPYTFGQGTKVEIKGGGGSGGGGSGGGGSEVQLVESGGGLVQPGGSLRLSCAASGFDFSRYWMSWVRQAPGKGLEWIGEINPDSSTINYAPSLKDKFIISRDNAKNSLYLQMNSLRAEDTAVYYCARPDGNYWYFDVWGQGTLVTVSSTRTRGGGGSEVQLVQSGAEVKKPGESLRISCKGSGYSFSTYWISWVRQMPGKGLEWMGKIYPGDSYTNYSPSFQGQVTISADKSISTAYLQWSSLKASDTAMYYCARGYGIFDYWGQGTLVTVSSGGGGSGGGGSGGGGSSYELTQPPSVSVSPGQTASITCSGDNIGDQYAHWYQQKPGQSPVLVIYQDKNRPSGIPERFSGSNSGNTATLTISGTQAMDEADYYCATYTGFGSLAVFGGGTKLTVLHHHHHH

SEQ ID NO: 2798 - protein, 517 aa, Artificial Sequence
  Synthetic Polypeptide
MALPVTALLLPLALLLHAARPDIVMTQSQKSMSTSVGDRVSITCKASQDVITGVAWYQQKPGQSPKLLIYSASYRYTGVPDRFTGSGSGTDFTFTISNVQAEDLAVYYCQQHYSTPLTFGAGTKLELKGGGGSGGGGSGGGGSQVQLQQPGAELVRPGASVKLSCKASGYSFTTYWMNWVKQRPGQGLEWIGMIHPSDSETRLNQKFKDKATLTVDKSSSTAYMQLSSPTSEDSAVYYCARSTMIATRAMDYWGQGTSVTVSSTRTRGGGGSEVQLVQSGAEVKKPGESLRISCKGSGYSFSTYWISWVRQMPGKGLEWMGKIYPGDSYTNYSPSFQGQVTISADKSISTAYLQWSSLKASDTAMYYCARGYGIFDYWGQGTLVTVSSGGGGSGGGGSGGGGSSYELTQPPSVSVSPGQTASITCSGDNIGDQYAHWYQQKPGQSPVLVIYQDKNRPSGIPERFSGSNSGNTATLTISGTQAMDEADYYCATYTGFGSLAVFGGGTKLTVLHHHHHH

SEQ ID NO: 2799 - protein, 522 aa, Artificial Sequence
  Synthetic Polypeptide
MALPVTALLLPLALLLHAARPDDIQMTQSPSSLSASVGDRVTITCRASQSISSYLNWYQQKPGKAPKLLIYAASSLQSGVPSRFSGSGSGTDFTLTISSLQPEDLATYYCQQSYSTPFTFGPGTKVDIKGGGGSGGGGSGGGGSVHEVQLVQSGAEVKKPGSSVKVSCKASGGTFSSYAISWVRQAPGQGLEWMGGIIPIFGTANYAQKFQGRVTITADKSTSTAYMELSSLRSEDTAVYYCATFALFGFREQAFDIWGQGTTVTVSSTRTRGGGGSEVQLVQSGAEVKKPGESLRISCKGSGYSFSTYWISWVRQMPGKGLEWMGKIYPGDSYTNYSPSFQGQVTISADKSISTAYLQWSSLKASDTAMYYCARGYGIFDYWGQGTLVTVSSGGGGSGGGGSGGGGSSYELTQPPSVSVSPGQTASITCSGDNIGDQYAHWYQQKPGQSPVLVIYQDKNRPSGIPERFSGSNSGNTATLTISGTQAMDEADYYCATYTGFGSLAVFGGGTKLTVLHHHHHH

SEQ ID NO: 2800 - protein, 517 aa, Artificial Sequence
  Synthetic Polypeptide
MALPVTALLLPLALLLHAARPDQIVLTQSPAIMSASPGEKVTISCSASSSVSYMYWYQQKPGSSPKPWIYRTSNLASGVPARFSGSGSGTSYSLTISNMEAEDAAAYYCQQYHSYPTTFGGGTKLEVKGGGGSGGGGSGGGGSEVQLVESGGGLVQPKGSLKLSCAASGFSFNTYAMNWVRQAPGKGLEWIAHIRSKSNNFATYYADSVKDRFSISRDASENILFLQMNNLKTEDTAMYYCVRQGGDFPMDYWGQGTSVTVSSTRTRGGGGSEVQLVQSGAEVKKPGESLRISCKGSGYSFSTYWISWVRQMPGKGLEWMGKIYPGDSYTNYSPSFQGQVTISADKSISTAYLQWSSLKASDTAMYYCARGYGIFDYWGQGTLVTVSSGGGGSGGGGSGGGGSSYELTQPPSVSVSPGQTASITCSGDNIGDQYAHWYQQKPGQSPVLVIYQDKNRPSGIPERFSGSNSGNTATLTISGTQAMDEADYYCATYTGFGSLAVFGGGTKLTVLHHHHHH

SEQ ID NO: 2801 - protein, 516 aa, Artificial Sequence
  Synthetic Polypeptide
MALPVTALLLPLALLLHAARPDDIQMTQSSSSFSVSLGDRVTITCMASEDIYIRLAWYQQKPGNAPRLLISAATSLETGVPSRFSGSGSGKDYTLSITSLQTEDVGTYYCQQYWSSPWTFGGGTKLEINGGGGSGGGGSGGGGSDVQLQESGPGLVKPSQSLSLTCTVTGYSITSDYTWNWIRQFPGNKLEWMGYITYSGSTSYNPSLKSRNSITRDTSKNQFFLQLNSVTTEDTATYYCARLGRRYTMDYWGQGTSVTVSSTRTRGGGGSEVQLVQSGAEVKKPGESLRISCKGSGYSFSTYWISWVRQMPGKGLEWMGKIYPGDSYTNYSPSFQGQVTISADKSISTAYLQWSSLKASDTAMYYCARGYGIFDYWGQGTLVTVSSGGGGSGGGGSGGGGSSYELTQPPSVSVSPGQTASITCSGDNIGDQYAHWYQQKPGQSPVLVIYQDKNRPSGIPERFSGSNSGNTATLTISGTQAMDEADYYCATYTGFGSLAVFGGGTKLTVLHHHHHH

SEQ ID NO: 2802 - protein, 516 aa, Artificial Sequence
  Synthetic Polypeptide
MALPVTALLLPLALLLHAARPDIQMTQSSSSFSVSLGDRVTITCKASEDIYIRLAWYQQKPGNAPRLLISAATSLETGIPSRFSGSGSGEDYTLTITSLQTEDVATYYCQQYWTTPWTFGGGTKLEIKRGGGGSGGGGSGGGGSDVQLQESGPGLVKPSQSLSLTCTVTGYSITIDYTWNWIRQFPGNKLEWMGYITYSGSTDYNPSLKSRSSITRDTSMNQFFLQLNSVTTEDTATYYCARLGRRYALDYWGQGTSVTVSSTRTRGGGGSEVQLVQSGAEVKKPGESLRISCKGSGYSFSTYWISWVRQMPGKGLEWMGKIYPGDSYTNYSPSFQGQVTISADKSISTAYLQWSSLKASDTAMYYCARGYGIFDYWGQGTLVTVSSGGGGSGGGGSGGGGSSYELTQPPSVSVSPGQTASITCSGDNIGDQYAHWYQQKPGQSPVLVIYQDKNRPSGIPERFSGSNSGNTATLTISGTQAMDEADYYCATYTGFGSLAVFGGGTKLTVLHHHHHH

SEQ ID NO: 2803 - protein, 515 aa, Artificial Sequence
  Synthetic Polypeptide
MALPVTALLLPLALLLHAARPDVVMTQSPSSLSASVGDRVTITCMASEDIYIRLAWYQQKPGNAPKLLIYAATSLETGVPSRFSGSGSGTDFTLTISSLQPEDFATYYCQQYWSSPWTFGGGTKVEIKGGGGSGGGGSGGGGSQVQLQESGPGLVKPSQTLSLTCTVSGYSITSDYTWNWIRQPPGNGLEWIGYITYSGSTSYNPSLKSRVLISVDTSKNQVSLKLSSVTAADTAVYYCARLGRRYTMDYWGQGTTVTVSSTRTRGGGGSEVQLVQSGAEVKKPGESLRISCKGSGYSFSTYWISWVRQMPGKGLEWMGKIYPGDSYTNYSPSFQGQVTISADKSISTAYLQWSSLKASDTAMYYCARGYGIFDYWGQGTLVTVSSGGGGSGGGGSGGGGSSYELTQPPSVSVSPGQTASITCSGDNIGDQYAHWYQQKPGQSPVLVIYQDKNRPSGIPERFSGSNSGNTATLTISGTQAMDEADYYCATYTGFGSLAVFGGGTKLTVLHHHHHH

SEQ ID NO: 2804 - protein, 519 aa, Artificial Sequence
  Synthetic Polypeptide
MALPVTALLLPLALLLHAARPEIVLTQSPATLSLSPGERATLSCSASSSVSYMYWYQQKPGQAPRLLIYRTSNLASGIPARFSGSGSGTDFTLTISSLEPEDFAVYYCQQYHSYPTTFGQGTKVEIKRTVGGGGSGGGGSGGGGSEVQLVESGGGLVQPGGSLRLSCAASGFSFNTYAMNWVRQAPGKGLEWVSHIRSKSNNFATYYADSVKDRFTISRDNAKNSLYLQMNSLRAEDTAVYYCARQGGDFPMDYWGQGTLVTVSSTRTRGGGGSEVQLVQSGAEVKKPGESLRISCKGSGYSFSTYWISWVRQMPGKGLEWMGKIYPGDSYTNYSPSFQGQVTISADKSISTAYLQWSSLKASDTAMYYCARGYGIFDYWGQGTLVTVSSGGGGSGGGGSGGGGSSYELTQPPSVSVSPGQTASITCSGDNIGDQYAHWYQQKPGQSPVLVIYQDKNRPSGIPERFSGSNSGNTATLTISGTQAMDEADYYCATYTGFGSLAVFGGGTKLTVLHHHHHH

SEQ ID NO: 2805 - protein, 515 aa, Artificial Sequence
  Synthetic Polypeptide
MALPVTALLLPLALLLHAARPDVVMTQSPSSLSASVGDRVTITCKASEDIYIRLAWYQQKPGKAPKLLIYAATSLETGVPSRFSGSGSGTDFTLTISSLQPEDFATYYCQQYWTTPWTFGGGTKVEIKGGGGSGGGGSGGGGSQVQLQESGPGLVKPSQTLSLTCTVSGYSITIDYTWNWIRQPPGKGLEWIGYITYSGSTDYNPSLKSRVLISVDTSKNQVSLKLSSVTAADTAVYYCARLGRRYALDYWGQGTTVTVSSTRTRGGGGSEVQLVQSGAEVKKPGESLRISCKGSGYSFSTYWISWVRQMPGKGLEWMGKIYPGDSYTNYSPSFQGQVTISADKSISTAYLQWSSLKASDTAMYYCARGYGIFDYWGQGTLVTVSSGGGGSGGGGSGGGGSSYELTQPPSVSVSPGQTASITCSGDNIGDQYAHWYQQKPGQSPVLVIYQDKNRPSGIPERFSGSNSGNTATLTISGTQAMDEADYYCATYTGFGSLAVFGGGTKLTVLHHHHHH

SEQ ID NO: 2806 - protein, 516 aa, Artificial Sequence
  Synthetic Polypeptide
MALPVTALLLPLALLLHAARPDIQMTQSPASLSASVGETVTIICRASVNIYSYLAWYQQKQGKSPQLLVYNAKILAEGVPSRFSGSGSGTQFSLKINSLQPEDFGSYYCQHHYGTFTFGSGTKLEIKRGGGGSGGGGSGGGGSQVQLKESGPGLVAPSQSLSITCTISGFSLTSYGVHWVRQPPGKGLEWLVVIWSDGSTTYNSALKSRLSISKDNSKSQVFLKMNSLQTDDTAIYYCASHYGSTLAFASWGHGTLVTVSAATRTRGGGGSEVQLVQSGAEVKKPGESLRISCKGSGYSFSTYWISWVRQMPGKGLEWMGKIYPGDSYTNYSPSFQGQVTISADKSISTAYLQWSSLKASDTAMYYCARGYGIFDYWGQGTLVTVSSGGGGSGGGGSGGGGSSYELTQPPSVSVSPGQTASITCSGDNIGDQYAHWYQQKPGQSPVLVIYQDKNRPSGIPERFSGSNSGNTATLTISGTQAMDEADYYCATYTGFGSLAVFGGGTKLTVLHHHHHH

SEQ ID NO: 2807 - protein, 524 aa, Artificial Sequence
  Synthetic Polypeptide
MALPVTALLLPLALLLHAARPDIVMTQSHKFMSTSVGDRVSVTCKASQNVGNNVAWYQQKPGQSPKVLIYSASYRYSGVPDRFTGSGSGTDFTLTISNVQSEDLAEYFCQQYNTYPFTFGSGTKLEIKGGGGSGGGGSGGGGSEVQLEESGGGLVQPGGSMKLSCVASGFTFSNYWMNWVRQSPEKGLEWVAEIRFKSHNYATHFAESVKGRFTISRDDSKSSVYLQMNNLRAEDTGIYYCTRRIGNSDYDWWYFDVWGAGTSVTVSSASTRTRGGGGSEVQLVQSGAEVKKPGESLRISCKGSGYSFSTYWISWVRQMPGKGLEWMGKIYPGDSYTNYSPSFQGQVTISADKSISTAYLQWSSLKASDTAMYYCARGYGIFDYWGQGTLVTVSSGGGGSGGGGSGGGGSSYELTQPPSVSVSPGQTASITCSGDNIGDQYAHWYQQKPGQSPVLVIYQDKNRPSGIPERFSGSNSGNTATLTISGTQAMDEADYYCATYTGFGSLAVFGGGTKLTVLHHHHHH

SEQ ID NO: 2808 - protein, 520 aa, Artificial Sequence
  Synthetic Polypeptide
MALPVTALLLPLALLLHAARPDIVMTQSPDSLAVSLGERATINCRASKSVSTSGYSFMHWYQQKPGQPPKLLIYLASNLESGVPDRFSGSGSGTDFTLTISSLQAEDVAVYYCQHSREVPWTFGQGTKVEIKRGGGGSGGGGSGGGGSQVQLVQSGAEVKKPGASVKVSCKASGYTFTNYGMNWVRQAPGQGLEWMGWINTYTGEPTYADAFKGRFAFSLDTSTSTAYLQINSLRSDDTAVYYCARDYGDYGMDYWGQGTTVTVSSTRTRGGGGSEVQLVQSGAEVKKPGESLRISCKGSGYSFSTYWISWVRQMPGKGLEWMGKIYPGDSYTNYSPSFQGQVTISADKSISTAYLQWSSLKASDTAMYYCARGYGIFDYWGQGTLVTVSSGGGGSGGGGSGGGGSSYELTQPPSVSVSPGQTASITCSGDNIGDQYAHWYQQKPGQSPVLVIYQDKNRPSGIPERFSGSNSGNTATLTISGTQAMDEADYYCATYTGFGSLAVFGGGTKLTVLHHHHHH

SEQ ID NO: 2809 - protein, 516 aa, Artificial Sequence
  Synthetic Polypeptide
MALPVTALLLPLALLLHAARPDIVMTQTPLTLSVTIGQPASISCKSSQSLLDSDGKTYLNWLLQRPGQSPERLIYLVSKLDSGVPDRFTGSGSGTDFTLKISRVEAEDLGVYCCWQGTHFPYTFGGGTKVEIKGGGGGSGGGGSGGGGSQVQLQQPGAELVRPGASVKLSCKASGYTFTSYWMNWVKQRPGQGLEWIGMIDPSDSETHYNHIFKDKATLTVDKSSSTAYLQLSSLTSEDSAVYYCARNLYLWGQGTSVTVSSTRTRGGGGSEVQLVQSGAEVKKPGESLRISCKGSGYSFSTYWISWVRQMPGKGLEWMGKIYPGDSYTNYSPSFQGQVTISADKSISTAYLQWSSLKASDTAMYYCARGYGIFDYWGQGTLVTVSSGGGGSGGGGSGGGGSSYELTQPPSVSVSPGQTASITCSGDNIGDQYAHWYQQKPGQSPVLVIYQDKNRPSGIPERFSGSNSGNTATLTISGTQAMDEADYYCATYTGFGSLAVFGGGTKLTVLHHHHHH

SEQ ID NO: 2810 - protein, 514 aa, Artificial Sequence
  Synthetic Polypeptide
MALPVTALLLPLALLLHAARPDIQMTQSPASLSVSVGETVTITCRASENIYSNLAWYQQKQGKSPQLLVYAATNLADGVPSRFSGSGSGTQYSLKINSLQSEDFGSYYCQHFWGTWTFGGGTTLEIKGGGGSGGGGSGGGGSEVQLQQSGPELVKPGASVKMSCKASGYTFTDYYMKWMKQSHGKSLEWIGDINPNNGGTTYNQKFKGKATLTVDKSSSTAYMQLNSLTSEDSAVYYCARDYGYGYFDYWGQGTTLTVSSTRTRGGGGSEVQLVQSGAEVKKPGESLRISCKGSGYSFSTYWISWVRQMPGKGLEWMGKIYPGDSYTNYSPSFQGQVTISADKSISTAYLQWSSLKASDTAMYYCARGYGIFDYWGQGTLVTVSSGGGGSGGGGSGGGGSSYELTQPPSVSVSPGQTASITCSGDNIGDQYAHWYQQKPGQSPVLVIYQDKNRPSGIPERFSGSNSGNTATLTISGTQAMDEADYYCATYTGFGSLAVFGGGTKLTVLHHHHHH

SEQ ID NO: 2811 - protein, 518 aa, Artificial Sequence
  Synthetic Polypeptide
MALPVTALLLPLALLLHAARPQSVLTQPPSASGTPGQRVTISCSGSRSNVGGNYVFWYQQVPGATPKLLIYRSNQRPSGVPDRFAGSKSGSSASLAISGLRSEDEADYYCATWDDSLSGFVFGTGTKVTVLGGGGGSGGGGSGGGGSEVQLVESGGGLVKPGGSLRLSCAASGFTFSDYYMSWIRQAPGKGLEWVSYISSSGSTIYYADSVKGRFTISRDNAKNSLYLQMNSLRAEDTAVYYCARGYGKAYDQWGQGTLVTVSSTRTRGGGGSEVQLVQSGAEVKKPGESLRISCKGSGYSFSTYWISWVRQMPGKGLEWMGKIYPGDSYTNYSPSFQGQVTISADKSISTAYLQWSSLKASDTAMYYCARGYGIFDYWGQGTLVTVSSGGGGSGGGGSGGGGSSYELTQPPSVSVSPGQTASITCSGDNIGDQYAHWYQQKPGQSPVLVIYQDKNRPSGIPERFSGSNSGNTATLTISGTQAMDEADYYCATYTGFGSLAVFGGGTKLTVLHHHHHH

SEQ ID NO: 2812 - protein, 517 aa, Artificial Sequence
  Synthetic Polypeptide
MALPVTALLLPLALLLHAARPQSVVTQPPSMSAAPGQQVTISCSGGNSNIERNYVSWYLQLPGTAPKLVIFDNDRRPSGIPDRFSGSKSGTSATLGITGLQTGDEADYYCGTWDSSLRGWVFGGGTKLTVLGGGGGSGGGGSGGGGSEVQLVESGGGLIQPGGSLRLSCAASGFTFSNYAMNWVRQAPGKGLEWVSTINGRGSSTIYADSVKGRFTISRDNSKNTLYLQMNSLRAEDTATYYCARYISRGLGDSWGQGTLVTVTRTRGGGGSEVQLVQSGAEVKKPGESLRISCKGSGYSFSTYWISWVRQMPGKGLEWMGKIYPGDSYTNYSPSFQGQVTISADKSISTAYLQWSSLKASDTAMYYCARGYGIFDYWGQGTLVTVSSGGGGSGGGGSGGGGSSYELTQPPSVSVSPGQTASITCSGDNIGDQYAHWYQQKPGQSPVLVIYQDKNRPSGIPERFSGSNSGNTATLTISGTQAMDEADYYCATYTGFGSLAVFGGGTKLTVLHHHHHH

SEQ ID NO: 2813 - protein, 520 aa, Artificial Sequence
  Synthetic Polypeptide
MALPVTALLLPLALLLHAARPDIVLTQSPLSLAVSLGQPAIISCKASQSVSFAGTSLMHWYHQKPGQQPRLLIYRASNLEAGVPDRFSGSGSKTDFTLTISPVEAEDAATYYCQQSREYPYTFGGGTKLEIKRGGGGSGGGGSGGGGSQVQLVQSGAEVVKPGASVKISCKASGYTFTGYFMNWVKQSPGQSLEWIGRIHPYDGDTFYNQKFQGKATLTVDKSSNTAHMELLSLTSEDFAVYYCTRYDGSRAMDYWGQGTTVTVSSTRTRGGGGSEVQLVQSGAEVKKPGESLRISCKGSGYSFSTYWISWVRQMPGKGLEWMGKIYPGDSYTNYSPSFQGQVTISADKSISTAYLQWSSLKASDTAMYYCARGYGIFDYWGQGTLVTVSSGGGGSGGGGSGGGGSSYELTQPPSVSVSPGQTASITCSGDNIGDQYAHWYQQKPGQSPVLVIYQDKNRPSGIPERFSGSNSGNTATLTISGTQAMDEADYYCATYTGFGSLAVFGGGTKLTVLHHHHHH

SEQ ID NO: 2814 - protein, 571 aa, Artificial Sequence
  Synthetic Polypeptide
MALPVTALLLPLALLLHAARPDILLTQSPVILSVSPGERVSFSCRASQSIGTNIHWYQQRTNGSPRLLIKYASESISGIPSRFSGSGSGTDFTLSINSVESEDIADYYCQQNNNWPTTFGAGTKLELKGGGGSGGGGSGGGGSQVQLKQSGPGLVQPSQSLSITCTVSGFSLTNYGVHWVRQSPGKGLEWLGVIWSGGNTDYNTPFTSRLSINKDNSKSQVFFKMNSLQSNDTAIYYCARALTYYDYEFAYWGQGTLVTVSATRTRGSAWSHPQFEKGGGSGGGSGGSAWSHPQFEKSRSSGGGGSQVQLVQSGGGVVQPGRSLRLSCKSSGYTFTRYTMHWVRQAPGKGLEWIGYINPSRGYTNYNQKVKDRFTISRDNSKNTAFLQMDSLRPEDTGVYFCARYYDDHYCLDYWGQGTPVTVSSVEGGSGGSGGSGGSGGVDDIQMTQSPSSLSASVGDRVTITCRASSSVSYMNWYQQTPGKAPKRWIYDTSKVASGVPSRFSGSGSGTDYTFTISSLQPEDIATYYCQQWSSNPLTFGQGTKLQITEQKLISEEDLSGGSHHHHHHLE

SEQ ID NO: 2815 - protein, 519 aa, Artificial Sequence
  Synthetic Polypeptide
MALPVTALLLPLALLLHAARPDILLTQSPVILSVSPGERVSFSCRASQSIGTNIHWYQQRTNGSPRLLIKYASESISGIPSRFSGSGSGTDFTLSINSVESEDIADYYCQQNNNWPTTFGAGTKLELKGGGGSGGGGSGGGGSQVQLKQSGPGLVQPSQSLSITCTVSGFSLTNYGVHWVRQSPGKGLEWLGVIWSGGNTDYNTPFTSRLSINKDNSKSQVFFKMNSLQSNDTAIYYCARALTYYDYEFAYWGQGTLVTVSATRTRGGGGSQVQLVQSGAEVKKPGASVKVSCKASGYTFTSYYIHWVRQAPGQGLEWIGCIYPGNVNTNYNEKFKDRATLTVDTSISTAYMELSRLRSDDTAVYFCTRSHYGLDWNFDVWGQGTTVTVSSGGGGSGGGGSGGGGSDIQMTQSPSSLSASVGDRVTITCHASQNIYVWLNWYQQKPGKAPKLLIYKASNLHTGVPSRFSGSGSGTDFTLTISSLQPEDFATYYCQQGQTYPYTFGGGTKVEIKHHHHHH

SEQ ID NO: 2816 - protein, 516 aa, Artificial Sequence
  Synthetic Polypeptide
MALPVTALLLPLALLLHAARPDILLTQSPVILSVSPGERVSFSCRASQSIGTNIHWYQQRTNGSPRLLIKYASESISGIPSRFSGSGSGTDFTLSINSVESEDIADYYCQQNNNWPTTFGAGTKLELKGGGGSGGGGSGGGGSQVQLKQSGPGLVQPSQSLSITCTVSGFSLTNYGVHWVRQSPGKGLEWLGVIWSGGNTDYNTPFTSRLSINKDNSKSQVFFKMNSLQSNDTAIYYCARALTYYDYEFAYWGQGTLVTVSATRTRGGGGSEVQLVQSGAEVKKPGESLRISCKGSGYSFSTYWISWVRQMPGKGLEWMGKIYPGDSYTNYSPSFQGQVTISADKSISTAYLQWSSLKASDTAMYYCARGYGIFDYWGQGTLVTVSSGGGGSGGGGSGGGGSSYELTQPPSVSVSPGQTASITCSGDNIGDQYAHWYQQKPGQSPVLVIYQDKNRPSGIPERFSGSNSGNTATLTISGTQAMDEADYYCATYTGFGSLAVFGGGTKLTVLHHHHHH

SEQ ID NO: 2817 - protein, 585 aa, Artificial Sequence
  Synthetic Polypeptide
MALPVTALLLPLALLLHAARPDVVMTQTPLSLPVSLGDQASISCRSSQSLVHSNGNTYLRWYLQKPGQSPKVLIYKVSNRVSGVPDRFSGSGSGTDFTLKINRVEAEDLGVYFCSQSTHVPWTFGGGTKLEIKSSADDAKKDAAKKDDAKKDDAKKDGGVKLDETGGGLVQPGGAMKLSCVTSGFTFGHYWMNWVRQSPEKGLEWVAQFRNKPYNYETYYSDSVKGRFTISRDDSKSSVYLQMNNLRVEDTGIYYCTGASYGMEYLGQGTSVTVSTTRTRGSAWSHPQFEKGGGSGGGSGGSAWSHPQFEKSRSSGGGGSQVQLVQSGGGVVQPGRSLRLSCKSSGYTFTRYTMHWVRQAPGKGLEWIGYINPSRGYTNYNQKVKDRFTISRDNSKNTAFLQMDSLRPEDTGVYFCARYYDDHYCLDYWGQGTPVTVSSVEGGSGGSGGSGGSGGVDDIQMTQSPSSLSASVGDRVTITCRASSSVSYMNWYQQTPGKAPKRWIYDTSKVASGVPSRFSGSGSGTDYTFTISSLQPEDIATYYCQQWSSNPLTFGQGTKLQITEQKLISEEDLSGGSHHHHHHLE

SEQ ID NO: 2818 - protein, 530 aa, Artificial Sequence
  Synthetic Polypeptide
MALPVTALLLPLALLLHAARPDVVMTQTPLSLPVSLGDQASISCRSSQSLVHSNGNTYLRWYLQKPGQSPKVLIYKVSNRVSGVPDRFSGSGSGTDFTLKINRVEAEDLGVYFCSQSTHVPWTFGGGTKLEIKSSADDAKKDAAKKDDAKKDDAKKDGGVKLDETGGGLVQPGGAMKLSCVTSGFTFGHYWMNWVRQSPEKGLEWVAQFRNKPYNYETYYSDSVKGRFTISRDDSKSSVYLQMNNLRVEDTGIYYCTGASYGMEYLGQGTSVTVSTTRTRGGGGSEVQLVQSGAEVKKPGESLRISCKGSGYSFSTYWISWVRQMPGKGLEWMGKIYPGDSYTNYSPSFQGQVTISADKSISTAYLQWSSLKASDTAMYYCARGYGIFDYWGQGTLVTVSSGGGGSGGGGSGGGGSSYELTQPPSVSVSPGQTASITCSGDNIGDQYAHWYQQKPGQSPVLVIYQDKNRPSGIPERFSGSNSGNTATLTISGTQAMDEADYYCATYTGFGSLAVFGGGTKLTVLHHHHHH

SEQ ID NO: 2819 - protein, 533 aa, Artificial Sequence
  Synthetic Polypeptide
MALPVTALLLPLALLLHAARPDVVMTQTPLSLPVSLGDQASISCRSSQSLVHSNGNTYLRWYLQKPGQSPKVLIYKVSNRVSGVPDRFSGSGSGTDFTLKINRVEAEDLGVYFCSQSTHVPWTFGGGTKLEIKSSADDAKKDAAKKDDAKKDDAKKDGGVKLDETGGGLVQPGGAMKLSCVTSGFTFGHYWMNWVRQSPEKGLEWVAQFRNKPYNYETYYSDSVKGRFTISRDDSKSSVYLQMNNLRVEDTGIYYCTGASYGMEYLGQGTSVTVSTTRTRGGGGSQVQLVQSGAEVKKPGASVKVSCKASGYTFTSYYIHWVRQAPGQGLEWIGCIYPGNVNTNYNEKFKDRATLTVDTSISTAYMELSRLRSDDTAVYFCTRSHYGLDWNFDVWGQGTTVTVSSGGGGSGGGGSGGGGSDIQMTQSPSSLSASVGDRVTITCHASQNIYVWLNWYQQKPGKAPKLLIYKASNLHTGVPSRFSGSGSGTDFTLTISSLQPEDFATYYCQQGQTYPYTFGGGTKVEIKHHHHHH

SEQ ID NO: 2820 - protein, 576 aa, Artificial Sequence
  Synthetic Polypeptide
MALPVTALLLPLALLLHAARPELVMTQSPASLAVSLGQRATISCRASESVDSYGKSFMHWYQLKPGQPPKLLIYRASNLESGVPARFSGSGSRTDFTLTIDPVEADDAATYYCQQNNEDPWTFGGGTKLEIKGGGGSGGGGSGGGGSEVQLEQSGPELVKPGASVKMSCKASGYTFTNYYMKWVKQSHGKSLEWIGDLNPNNGDTFYNQKFKGKATLTVDKSSNTAYMQLNSLTSEDSAVYYCARTGRYEENAMDYWGQGTSVTVSSTRTRGSAWSHPQFEKGGGSGGGSGGSAWSHPQFEKSRSSGGGGSQVQLVQSGGGVVQPGRSLRLSCKSSGYTFTRYTMHWVRQAPGKGLEWIGYINPSRGYTNYNQKVKDRFTISRDNSKNTAFLQMDSLRPEDTGVYFCARYYDDHYCLDYWGQGTPVTVSSVEGGSGGSGGSGGSGGVDDIQMTQSPSSLSASVGDRVTITCRASSSVSYMNWYQQTPGKAPKRWIYDTSKVASGVPSRFSGSGSGTDYTFTISSLQPEDIATYYCQQWSSNPLTFGQGTKLQITEQKLISEEDLSGGSHHHHHHLE

SEQ ID NO: 2821 - protein, 533 aa, Artificial Sequence; identical to SEQ ID NO: 2819
  Synthetic Polypeptide

SEQ ID NO: 2822 - DNA, 1503 bp, Artificial Sequence
  Synthetic Polynucleotide
atggccttaccagtgaccgccttgctcctgccgctggccttgctgctccacgccgccaggccggacatccagatgacacagactacatcctccctgtctgcctctctgggagacagagtcaccatcagttgcagggcaagtcaggacattagtaaatatttaaattggtatcagcagaaaccagatggaactgttaaactcctgatctaccatacatcaagattacactcaggagtcccatcaaggttcagtggcagtgggtctggaacagattattctctcaccattagcaacctggagcaagaagatattgccacttacttttgccaacagggtaatacgcttccgtacacgttcggaggggggaccaagctggagatcacaggtggcggtggctcgggcggtggtgggtcgggtggcggcggatctgaggtgaaactgcaggagtcaggacctggcctggtggcgccctcacagagcctgtccgtcacatgcactgtctcaggggtctcattacccgactatggtgtaagctggattcgccagcctccacgaaagggtctggagtggctgggagtaatatggggtagtgaaaccacatactataattcagctctcaaatccagactgaccatcatcaaggacaactccaagagccaagttttcttaaaaatgaacagtctgcaaactgatgacacagccatttactactgtgccaaacattattactacggtggtagctatgctatggactactggggtcaaggaacctcagtcaccgtctcctcacgcgtagagcagaaactgatctcggaagaggatctggcgaagcccaccacgacgccagcgccgcgaccaccaacaccggcgcccaccatcgcgtcgcagcccctgtccctgcgcccagaggcgtgccggccagcggcggggggcgcagtgcacacgagggggctggacttcgcctgtgacatctacatctgggcgcccttggccgggacttgtggggtccttctcctgtcactggttatcaccctttactgcaaacggggcagaaagaaactcctgtatatattcaaacaaccatttatgagaccagtacaaactactcaagaggaagatggctgtagctgccgatttccagaagaagaagaaggaggatgtgaactgagagtgaagttcagcaggagcgcagacgcccccgcgtaccagcagggccagaaccagctctataacgagctgaatctaggacgaagagaggagtacgatgttttggacaagagacgtggccgggaccctgagatggggggaaagccgagaaggaagaaccctcaggaaggcctgtacaatgaactgcagaaagataagatggcggaggcctacagtgagattgggatgaaaggcgagcgccggaggggcaaggggcacgatggcctttaccagggtctcagtacagccaccaaggacacctacgacgcccttcacatgcaggccctgccccctcgc

SEQ ID NO: 2823 - DNA, 1509 bp, Artificial Sequence
  Synthetic Polynucleotide
atggccttaccagtgaccgccttgctcctgccgctggccttgctgctccacgccgccaggccggacatccagatgacccagagccctagctcactgagcgccagcgtgggcgacagggtgaccattacctgctccgccagccaggacatcagcaactacctgaactggtaccagcagaagcccggcaaggcccccaagctgctgatctactacacctccaacctgcactccggcgtgcccagcaggttcagcggaagcggcagcggcaccgatttcaccctgaccatctccagcctgcagcccgaggacttcgccacctactactgccagcagtacaggaagctcccctggactttcggccagggcaccaaactggagatcaagcgtggcggaggcggaagtggaggcggaggatctggcggcggaggctctcaggtgcagctggtccagagcggcgccgaagtgaagaagcccggcagctccgtgaaagtgagctgcaaggccagcggcggcaccttcagcaactactggatgcactgggtgaggcaggcccccggacagggcctggagtggatgggcgccacctacaggggccacagcgacacctactacaaccagaagttcaagggccgggtgaccatcaccgccgacaagagcaccagcaccgcctacatggaactgagcagcctcaggagcgaggacaccgctgtgtattactgcgccaggggcgccatctacgacggctacgacgtgctggacaactggggccagggcacactggtgaccgtgtccagcacgcgtgagcagaaactgatctcggaagaggatctggcgaagcccaccacgacgccagcgccgcgaccaccaacaccggcgcccaccatcgcgtcgcagcccctgtccctgcgcccagaggcgtgccggccagcggcggggggcgcagtgcacacgagggggctggacttcgcctgtgacatctacatctgggcgcccttggccgggacttgtggggtccttctcctgtcactggttatcaccctttactgcaaacggggcagaaagaaactcctgtatatattcaaacaaccatttatgagaccagtacaaactactcaagaggaagatggctgtagctgccgatttccagaagaagaagaaggaggatgtgaactgagagtgaagttcagcaggagcgcagacgcccccgcgtaccagcagggccagaaccagctctataacgagctgaatctaggacgaagagaggagtacgatgttttggacaagagacgtggccgggaccctgagatggggggaaagccgagaaggaagaaccctcaggaaggcctgtacaatgaactgcagaaagataagatggcggaggcctacagtgagattgggatgaaaggcgagcgccggaggggcaaggggcacgatggcctttaccagggtctcagtacagccaccaaggacacctacgacgcccttcacatgcaggccctgccccctcgc

SEQ ID NO: 2824 - DNA, 1512 bp, Artificial Sequence
  Synthetic Polynucleotide
atggccttaccagtgaccgccttgctcctgccgctggccttgctgctccacgccgccaggccggacgagatcgtgctgacacagagccctgccaccctgtctctgagccctggcgaaagagccaccctgagctgtagagccagccagagcgtgtccagctacctggcctggtatcagcagaagcccggccaggctccccggctgctgatctacgatgccagcaatagagccaccggcatccccgccagattttccggctctggcagcggcaccgacttcaccctgaccatcagctccctggaacccgaggacttcgccgtgtactactgccagcagcggagcaactggcccatcacattcggccagggcacccggctggaaatcaaaggcggaggcggaagtggaggcggaggatctggcggcggaggctctgaagtgcagctggtggaatcaggcggcggactggtgcagcctggcagaagcctgagactgagctgtgccgccagcggcttcaccttcaacgactacgccatgcactgggtgcgccaggcccctggaaaaggactggaatgggtgtccacaatcagctggaacagcggcagcatcggctacgccgatagcgtgaagggccggttcaccatcagccgggacaacgccaagaagtccctgtacctccagatgaacagcctgcgggccgaggacacagccctgtactattgcgccaaggacatccagtacggcaactactactacggcatggacgtgtggggccagggaaccaccgtgaccgtgtcatctacgcgtgagcagaaactgatctcggaagaggatctggcgaagcccaccacgacgccagcgccgcgaccaccaacaccggcgcccaccatcgcgtcgcagcccctgtccctgcgcccagaggcgtgccggccagcggcggggggcgcagtgcacacgagggggctggacttcgcctgtgacatctacatctgggcgcccttggccgggacttgtggggtccttctcctgtcactggttatcaccctttactgcaaacggggcagaaagaaactcctgtatatattcaaacaaccatttatgagaccagtacaaactactcaagaggaagatggctgtagctgccgatttccagaagaagaagaaggaggatgtgaactgagagtgaagttcagcaggagcgcagacgcccccgcgtaccagcagggccagaaccagctctataacgagctgaatctaggacgaagagaggagtacgatgttttggacaagagacgtggccgggaccctgagatggggggaaagccgagaaggaagaaccctcaggaaggcctgtacaatgaactgcagaaagataagatggcggaggcctacagtgagattgggatgaaaggcgagcgccggaggggcaaggggcacgatggcctttaccagggtctcagtacagccaccaaggacacctacgacgcccttcacatgcaggccctgccccctcgc

SEQ ID NO: 2825 - DNA, 1509 bp, Artificial Sequence
  Synthetic Polynucleotide
atggccttaccagtgaccgccttgctcctgccgctggccttgctgctccacgccgccaggccggacatcgtgctgacacagagccctgcttctctggccgtgtctctgggacagagagccaccatcagctgtagagccagcgagagcgtggacaactacggcaacaccttcatgcactggtatcagcagaagcccggccagcctcctaagctgctgatctacagagccagcaacctggaaagcggcatccccgccagattttctggcagcggcagcagaaccgacttcaccctgaccatcaatcccgtggaagccgacgacgtggcaacctactactgccagcagagcaacgaggaccctcctacatttggagccggcaccaagctggaactgaaaggcggaggcggaagtggaggcggaggatctggcggcggaggctctcagattcagctggtgcagtctggccccgagctgaagaaacctggcgagacagtgaagatcagctgcaaggccagcggctacatcttcaccaattacggcatgaactgggtcaagcaggcccctggcaagagcttcaagtggatgggctggatcaacacctacaccggcgagagcacatacagcgccgacttcaagggcagattcgccttcagcctggaaaccagcgccagcacagcctacctgcacatcaacgacctgaagaacgaggacaccgccacctacttttgcgccagaagcggcggctacgaccctatggattattggggccagggcaccagcgtgaccgtttcttctacgcgtgagcagaaactgatctcggaagaggatctggcgaagcccaccacgacgccagcgccgcgaccaccaacaccggcgcccaccatcgcgtcgcagcccctgtccctgcgcccagaggcgtgccggccagcggcggggggcgcagtgcacacgagggggctggacttcgcctgtgacatctacatctgggcgcccttggccgggacttgtggggtccttctcctgtcactggttatcaccctttactgcaaacggggcagaaagaaactcctgtatatattcaaacaaccatttatgagaccagtacaaactactcaagaggaagatggctgtagctgccgatttccagaagaagaagaaggaggatgtgaactgagagtgaagttcagcaggagcgcagacgcccccgcgtaccagcagggccagaaccagctctataacgagctgaatctaggacgaagagaggagtacgatgttttggacaagagacgtggccgggaccctgagatggggggaaagccgagaaggaagaaccctcaggaaggcctgtacaatgaactgcagaaagataagatggcggaggcctacagtgagattgggatgaaaggcgagcgccggaggggcaaggggcacgatggcctttaccagggtctcagtacagccaccaaggacacctacgacgcccttcacatgcaggccctgccccctcgc

SEQ ID NO: 2826 - DNA, 1500 bp, Artificial Sequence
  Synthetic Polynucleotide
atggccttaccagtgaccgccttgctcctgccgctggccttgctgctccacgccgccaggccggacatccagatgacccagagccccagcagcctgtctgccagcgtgggcgacagagtgaccatcacatgcaaggccagccaggacgtgggaatcgccgtggcctggtatcagcagaaacccggcaaggtgcccaagctgctgatctactgggccagcaccagacacaccggcgtgcccgatagattttccggcagcggctccggcaccgacttcaccctgacaatcagctccctccagcccgaggacgtggcaacctactactgccagcagtacagcagctacccctacaccttcggccagggcaccaaggtggaaatcaagggcggaggcggaagtggaggcggaggatctggcggcggaggctctgaagtgcaactggtggaatcaggcggcggactggtgcagcctggcggatctctgagactgagctgtgccgccagcggcttcgacttcagccggtactggatgagctgggtgcgccaggcccctggcaaaggactggaatggatcggcgagatcaaccccgacagcagcaccatcaactacgcccccagcctgaaggacaagttcatcatcagccgggacaacgccaagaacagcctgtacctccagatgaactccctgcgggccgaggacaccgccgtgtactattgcgccagacccgacggcaactactggtacttcgacgtgtggggccagggaaccctcgtgaccgtgtcatctacgcgtgagcagaaactgatctcggaagaggatctggcgaagcccaccacgacgccagcgccgcgaccaccaacaccggcgcccaccatcgcgtcgcagcccctgtccctgcgcccagaggcgtgccggccagcggcggggggcgcagtgcacacgagggggctggacttcgcctgtgacatctacatctgggcgcccttggccgggacttgtggggtccttctcctgtcactggttatcaccctttactgcaaacggggcagaaagaaactcctgtatatattcaaacaaccatttatgagaccagtacaaactactcaagaggaagatggctgtagctgccgatttccagaagaagaagaaggaggatgtgaactgagagtgaagttcagcaggagcgcagacgcccccgcgtaccagcagggccagaaccagctctataacgagctgaatctaggacgaagagaggagtacgatgttttggacaagagacgtggccgggaccctgagatggggggaaagccgagaaggaagaaccctcaggaaggcctgtacaatgaactgcagaaagataagatggcggaggcctacagtgagattgggatgaaaggcgagcgccggaggggcaaggggcacgatggcctttaccagggtctcagtacagccaccaaggacacctacgacgcccttcacatgcaggccctgccccctcgc

SEQ ID NO: 2827 - DNA, 1512 bp, Artificial Sequence
  Synthetic Polynucleotide
atggccttaccagtgaccgccttgctcctgccgctggccttgctgctccacgccgccaggccggacatcgtgctgacccagagccctctgagcctggccgtgtctctgggacagcctgccatcatcagctgcaaggccagccagagcgtgtcctttgccggcacctctctgatgcactggtatcaccagaagcccggccagcagcccagactgctgatctacagagccagcaacctggaagccggcgtgcccgatagattttccggcagcggcagcaagaccgacttcaccctgaccatcagccccgtggaagccgaagatgccgccacctactactgccagcagagcagagagtacccctacaccttcggcggaggcaccaagctggaaatcaagaggggcggaggcggaagtggaggcggaggatctggcggcggaggctctcaggtccaactggtgcagagcggagccgaggtcgtgaagcctggcgcttccgtgaagattagctgcaaagccagcggctacacctttaccggctactttatgaactgggtcaagcagagccctggccagagcctggaatggatcggcagaatccacccctacgacggcgacaccttctacaaccagaagttccagggcaaggccaccctgacagtggacaagagcagcaacaccgcccacatggaactgctgagcctgaccagcgaggacttcgccgtgtactactgcaccagatacgacggcagccgggctatggactattggggccagggcaccaccgtgaccgtgtctagtacgcgtgagcagaaactgatctcggaagaggatctggcgaagcccaccacgacgccagcgccgcgaccaccaacaccggcgcccaccatcgcgtcgcagcccctgtccctgcgcccagaggcgtgccggccagcggcggggggcgcagtgcacacgagggggctggacttcgcctgtgacatctacatctgggcgcccttggccgggacttgtggggtccttctcctgtcactggttatcaccctttactgcaaacggggcagaaagaaactcctgtatatattcaaacaaccatttatgagaccagtacaaactactcaagaggaagatggctgtagctgccgatttccagaagaagaagaaggaggatgtgaactgagagtgaagttcagcaggagcgcagacgcccccgcgtaccagcagggccagaaccagctctataacgagctgaatctaggacgaagagaggagtacgatgttttggacaagagacgtggccgggaccctgagatggggggaaagccgagaaggaagaaccctcaggaaggcctgtacaatgaactgcagaaagataagatggcggaggcctacagtgagattgggatgaaaggcgagcgccggaggggcaaggggcacgatggcctttaccagggtctcagtacagccaccaaggacacctacgacgcccttcacatgcaggccctgccccctcgc

SEQ ID NO: 2828 - DNA, 1506 bp, Artificial Sequence
  Synthetic Polynucleotide
atggccttaccagtgaccgccttgctcctgccgctggccttgctgctccacgccgccaggccggacatccagatgacccagagccccagcagcctgtctgccagcgtgggcgacagagtgaccatcacctgtagagccagccagggcatcagctcttggctggcctggtatcagcagaagcccgagaaggcccccaagagcctgatctacgccgcctctagtctccagagcggcgtgcccagcagattttctggcagcggctccggcaccgacttcaccctgacaatcagctccctccagcccgaggacttcgccacctactactgccagcagtacaacagctacccccccacctttggcggaggcaccaaggtggaaatcaagggcggaggcggaagtggaggcggaggatctggcggcggaggctctgaagtgcaactggtggaatcaggcggcggactggtgcagcctggcgagtctctgagactgagctgtgtggcctccggcttcaccttcagccggtacaagatgaactgggtgcgccaggcccctggcaagggactggaatgggtgtcctacatcagccgcagcggcagagacatctactacgccgacagcgtgaagggccggttcaccatcagcagagacaacgccaagaacagcctgtacctccagatgaactccctgcgggacgaggacaccgccgtgtactactgtgccggaaccgtgaccacctattactacttcggcatggacgtgtggggccacggcaccaccgtgacagtgtcatctacgcgtgagcagaaactgatctcggaagaggatctggcgaagcccaccacgacgccagcgccgcgaccaccaacaccggcgcccaccatcgcgtcgcagcccctgtccctgcgcccagaggcgtgccggccagcggcggggggcgcagtgcacacgagggggctggacttcgcctgtgacatctacatctgggcgcccttggccgggacttgtggggtccttctcctgtcactggttatcaccctttactgcaaacggggcagaaagaaactcctgtatatattcaaacaaccatttatgagaccagtacaaactactcaagaggaagatggctgtagctgccgatttccagaagaagaagaaggaggatgtgaactgagagtgaagttcagcaggagcgcagacgcccccgcgtaccagcagggccagaaccagctctataacgagctgaatctaggacgaagagaggagtacgatgttttggacaagagacgtggccgggaccctgagatggggggaaagccgagaaggaagaaccctcaggaaggcctgtacaatgaactgcagaaagataagatggcggaggcctacagtgagattgggatgaaaggcgagcgccggaggggcaaggggcacgatggcctttaccagggtctcagtacagccaccaaggacacctacgacgcccttcacatgcaggccctgccccctcgc

SEQ ID NO: 2829 - DNA, 1497 bp, Artificial Sequence
  Synthetic Polynucleotide
atggccttaccagtgaccgccttgctcctgccgctggccttgctgctccacgccgccaggccggacatccagatgacccagagccccagcagcctgtctgccagcgtgggcgacagagtgaccatcacctgtaccgccagcctgagcgtgtccagcacctacctgcactggtatcagcagaagcccggcagcagccccaagctgtggatctacagcaccagcaacctggcctccggcgtgcccagcagattttctggcagcggctctggcaccagctacaccctgaccatcagctccctccagcccgaggacttcgccacctactactgccaccagtaccacagaagccccctgacctttggcggaggcaccaaggtggaaatcaagagaggcggaggcggaagtggaggcggaggatctggcggcggaggctctgaagtgcaactggtggaatctggcggcggactggtgcagcctggcggatctctgagactgagctgtgccgccagcggcttcagcctgaccaaatacggcgtgcactgggtgcgccaggcccctggaaaaggactggaatgggtgggagtgaagtgggctggcggctccaccgactacaacagcgccctgatgagccggttcaccatcagcaaggacaacgccaagaacagcctgtacctccagatgaactccctgcgggccgaggacaccgccgtgtactactgtgccagagatcaccgggacgctatggactactggggccagggaacactcgtgaccgtgtcctctacgcgtgagcagaaactgatctcggaagaggatctggcgaagcccaccacgacgccagcgccgcgaccaccaacaccggcgcccaccatcgcgtcgcagcccctgtccctgcgcccagaggcgtgccggccagcggcggggggcgcagtgcacacgagggggctggacttcgcctgtgacatctacatctgggcgcccttggccgggacttgtggggtccttctcctgtcactggttatcaccctttactgcaaacggggcagaaagaaactcctgtatatattcaaacaaccatttatgagaccagtacaaactactcaagaggaagatggctgtagctgccgatttccagaagaagaagaaggaggatgtgaactgagagtgaagttcagcaggagcgcagacgcccccgcgtaccagcagggccagaaccagctctataacgagctgaatctaggacgaagagaggagtacgatgttttggacaagagacgtggccgggaccctgagatggggggaaagccgagaaggaagaaccctcaggaaggcctgtacaatgaactgcagaaagataagatggcggaggcctacagtgagattgggatgaaaggcgagcgccggaggggcaaggggcacgatggcctttaccagggtctcagtacagccaccaaggacacctacgacgcccttcacatgcaggccctgccccctcgc

SEQ ID NO: 2830 - DNA, 1509 bp, Artificial Sequence
  Synthetic Polynucleotide
atggccttaccagtgaccgccttgctcctgccgctggccttgctgctccacgccgccaggccggacatccagatgacccagagccccagcagcctgtctgccagcgtgggcgacagagtgaccatcacatgcaaggccagccaggacgtgggaacagccgtggcctggtatcagcagaagcctggcaaggcccccaagctgctgatctacagcgccagctacagatccaccggcgtgcccagcagattttccggctctggcagcggcaccgacttcaccctgaccatctctagcctccagcccgaggacttcgccacctactactgccagcaccactactccgccccctggacatttggcggaggcaccaaggtggaaatcaagggcggaggcggaagtggaggcggaggatctggcggcggaggctctgaagtgcaactggtggaatcaggcggcggactggtgcagcctggcggatctctgagactgagctgtgccgccagcggcttcaccttcagcagaaacggcatgagctgggtgcgccaggcccctggaaaaggactggaatgggtggcaaccgtgtccagcggcggcagctacatctactacgccgacagcgtgaagggccggttcaccatctccagagacaacgccaagaacagcctgtacctccagatgaactccctgcgggccgaggacaccgccgtgtactattgtgccagacagggcaccaccgccctggctaccagattcttcgatgtgtggggccagggcaccctcgtgaccgtgtcatctacgcgtgagcagaaactgatctcggaagaggatctggcgaagcccaccacgacgccagcgccgcgaccaccaacaccggcgcccaccatcgcgtcgcagcccctgtccctgcgcccagaggcgtgccggccagcggcggggggcgcagtgcacacgagggggctggacttcgcctgtgacatctacatctgggcgcccttggccgggacttgtggggtccttctcctgtcactggttatcaccctttactgcaaacggggcagaaagaaactcctgtatatattcaaacaaccatttatgagaccagtacaaactactcaagaggaagatggctgtagctgccgatttccagaagaagaagaaggaggatgtgaactgagagtgaagttcagcaggagcgcagacgcccccgcgtaccagcagggccagaaccagctctataacgagctgaatctaggacgaagagaggagtacgatgttttggacaagagacgtggccgggaccctgagatggggggaaagccgagaaggaagaaccctcaggaaggcctgtacaatgaactgcagaaagataagatggcggaggcctacagtgagattgggatgaaaggcgagcgccggaggggcaaggggcacgatggcctttaccagggtctcagtacagccaccaaggacacctacgacgcccttcacatgcaggccctgccccctcgc

SEQ ID NO: 2831 - DNA, 1503 bp, Artificial Sequence
  Synthetic Polynucleotide
atggccttaccagtgaccgccttgctcctgccgctggccttgctgctccacgccgccaggccggacatccagatgacccagagccccagcagcctgtctgccagcgtgggcgacagagtgaccatcacctgtagagccagccaggacgtgaacaccgccgtggcctggtatcagcagaagcctggcaaggcccccaagctgctgatctacagcgccagcttcctggaaagcggcgtgcccagcagattcagcggaagcagaagcggcaccgacttcaccctgaccatcagctccctccagcccgaggacttcgccacctactactgccagcagcactacaccacccctcccaccttcggccagaccaaggtggaaatcaagagaggcggaggcggaagtggaggcggaggatctggcggcggaggctctgaagtgcaactggtggaatctggcggcggactggtgcagcctggcggatctctgagactgagctgtgccgccagcggcttcaacatcaaggacacctacatccactgggtgcgccaggcccctggaaagggactggaatgggtggcccggatctaccccaccaacggctacaccagatacgccgacagcgtgaagggccggttcaccatcagcgccgacaccagcaagaataccgcctacctccagatgaacagcctgcgggccgaggataccgccgtgtactactgctcaagatggggaggcgacggcttctacgctatggacgtgtggggccagggcacccttgtgaccgtgtcatctacgcgtgagcagaaactgatctcggaagaggatctggcgaagcccaccacgacgccagcgccgcgaccaccaacaccggcgcccaccatcgcgtcgcagcccctgtccctgcgcccagaggcgtgccggccagcggcggggggcgcagtgcacacgagggggctggacttcgcctgtgacatctacatctgggcgcccttggccgggacttgtggggtccttctcctgtcactggttatcaccctttactgcaaacggggcagaaagaaactcctgtatatattcaaacaaccatttatgagaccagtacaaactactcaagaggaagatggctgtagctgccgatttccagaagaagaagaaggaggatgtgaactgagagtgaagttcagcaggagcgcagacgcccccgcgtaccagcagggccagaaccagctctataacgagctgaatctaggacgaagagaggagtacgatgttttggacaagagacgtggccgggaccctgagatggggggaaagccgagaaggaagaaccctcaggaaggcctgtacaatgaactgcagaaagataagatggcggaggcctacagtgagattgggatgaaaggcgagcgccggaggggcaaggggcacgatggcctttaccagggtctcagtacagccaccaaggacacctacgacgcccttcacatgcaggccctgccccctcgc

SEQ ID NO: 2832 - DNA, 1503 bp, Artificial Sequence
  Synthetic Polynucleotide
atggccttaccagtgaccgccttgctcctgccgctggccttgctgctccacgccgccaggccgcaggtgcaactgcaggaatctggccctggcctcgtgaagcccagcgagacactgagcctgacctgtaccgtgtctggcggctctgtgtccagcggcagctactactggtcctggatcagacagccccctggcaagggcctggaatggatcggctacatctactacagcggctccaccaactacaaccccagcctgaagtcccgcgtgaccatctccgtggacaccagcaagaaccagttctccctgaagctgagcagcgtgacagccgccgataccgccgtgtactactgtgccagagagggcaagaacggggccttcgacatctggggccagggcacaatggtcaccgtgtcctctggcggcggaggctcaggcggaggcggatctggcgggggaggatctgacatccagatgacccagagccccagcagcctgtctgccagcgtgggcgacagagtgaccatcacctgtagagccagccagagcatcagcagctacctgaactggtatcagcagaagcccggcaaggcccccaaactgctgatctacgccgccagctctctgcagtctggcgtgccatctggctttagcggcagcggctctggcaccgacttcaccctgaccatcagctccctgcagcccgaggacttcgccacctactactgccagcagagctacagcacccccctgacctttggcggaggcaccaaggtggaaatcaagagaacgcgtgagcagaaactgatctcggaagaggatctggcgaagcccaccacgacgccagcgccgcgaccaccaacaccggcgcccaccatcgcgtcgcagcccctgtccctgcgcccagaggcgtgccggccagcggcggggggcgcagtgcacacgagggggctggacttcgcctgtgacatctacatctgggcgcccttggccgggacttgtggggtccttctcctgtcactggttatcaccctttactgcaaacggggcagaaagaaactcctgtatatattcaaacaaccatttatgagaccagtacaaactactcaagaggaagatggctgtagctgccgatttccagaagaagaagaaggaggatgtgaactgagagtgaagttcagcaggagcgcagacgcccccgcgtaccagcagggccagaaccagctctataacgagctgaatctaggacgaagagaggagtacgatgttttggacaagagacgtggccgggaccctgagatggggggaaagccgagaaggaagaaccctcaggaaggcctgtacaatgaactgcagaaagataagatggcggaggcctacagtgagattgggatgaaaggcgagcgccggaggggcaaggggcacgatggcctttaccagggtctcagtacagccaccaaggacacctacgacgcccttcacatgcaggccctgccccctcgc

SEQ ID NO: 2833 - DNA, 1500 bp, Artificial Sequence
  Synthetic Polynucleotide
atggccttaccagtgaccgccttgctcctgccgctggccttgctgctccacgccgccaggccggacgacatccagatgacccagagcagcagcagcttcagcgtgagcctgggcgacagagtgaccatcacctgcatggccagcgaggacatctacatcagactggcctggtaccagcagaagcccggcaacgcccccagactgctgatcagcgccgccaccagcctggagaccggcgtgcccagcagattcagcggcagcggcagcggcaaggactacaccctgagcatcaccagcctgcagaccgaggacgtgggcacctactactgccagcagtactggagcagcccctggaccttcggcggcggcaccaagctggagatcaacggcggaggcggaagtggaggcggaggatctggcggcggaggctctgacgtgcagctgcaggagagcggccccggcctggtgaagcccagccagagcctgagcctgacctgcaccgtgaccggctacagcatcaccagcgactacacctggaactggatcagacagttccccggcaacaagctggagtggatgggctacatcacctacagcggcagcaccagctacaaccccagcctgaagagcagaaacagcatcaccagagacaccagcaagaaccagttcttcctgcagctgaacagcgtgaccaccgaggacaccgccacctactactgcgccagactgggcagaagatacacaatggactactggggccagggcaccagcgtgaccgtgagcagcacgcgtgagcagaaactgatctcggaagaggatctggcgaagcccaccacgacgccagcgccgcgaccaccaacaccggcgcccaccatcgcgtcgcagcccctgtccctgcgcccagaggcgtgccggccagcggcggggggcgcagtgcacacgagggggctggacttcgcctgtgacatctacatctgggcgcccttggccgggacttgtggggtccttctcctgtcactggttatcaccctttactgcaaacggggcagaaagaaactcctgtatatattcaaacaaccatttatgagaccagtacaaactactcaagaggaagatggctgtagctgccgatttccagaagaagaagaaggaggatgtgaactgagagtgaagttcagcaggagcgcagacgcccccgcgtaccagcagggccagaaccagctctataacgagctgaatctaggacgaagagaggagtacgatgttttggacaagagacgtggccgggaccctgagatggggggaaagccgagaaggaagaaccctcaggaaggcctgtacaatgaactgcagaaagataagatggcggaggcctacagtgagattgggatgaaaggcgagcgccggaggggcaaggggcacgatggcctttaccagggtctcagtacagccaccaaggacacctacgacgcccttcacatgcaggccctgccccctcgc

SEQ ID NO: 2834 - DNA, 1515 bp, Artificial Sequence
  Synthetic Polynucleotide
atggccttaccagtgaccgccttgctcctgccgctggccttgctgctccacgccgccaggccggaccagaccgtcgtgacacagcctcctagcgcctctggcacaccaggccagagagtgaccatctcctgtagcggcagcagcagcaacatcggcagcaactacgtgtactggtatcagcaactgcccggcaccgcccccaagctgctgatctacagaagcaaccagcggcccagcggcgtgcccgatagattttctggcagcaagagcggcaccagcgccagcctggctatctctggacctagaagcgtggacgaggccgactactactgcgccgcctgggacgatagcctgaacggcgtggtgtttggcggaggcaccaagctgacagtgctgggtggcggaggcggaagtggaggcggaggatctggcggcggaggctctcaggtgcaactggtgcagtctggggccgaagtgaagaaacccggcagctccgtgaaggtgtcctgcaaggcttccggcggcaccttcagcagctacgccatttcttgggtgcgccaggcccctggacagggcctggaatggatgggcggcatcatccccatctttggcaccgccaactacgcccagaaattccagggccgcgtgaccatcaccgccgacgagtctacaagcaccgcctacatggaactgagcagcctgcggagcgaggataccgccgtgtactactgtgccagaagaatccccccctactacggcatggacgtgtggggccagggaaccaccgtgaccgtgtcatctacgcgtgagcagaaactgatctcggaagaggatctggcgaagcccaccacgacgccagcgccgcgaccaccaacaccggcgcccaccatcgcgtcgcagcccctgtccctgcgcccagaggcgtgccggccagcggcggggggcgcagtgcacacgagggggctggacttcgcctgtgacatctacatctgggcgcccttggccgggacttgtggggtccttctcctgtcactggttatcaccctttactgcaaacggggcagaaagaaactcctgtatatattcaaacaaccatttatgagaccagtacaaactactcaagaggaagatggctgtagctgccgatttccagaagaagaagaaggaggatgtgaactgagagtgaagttcagcaggagcgcagacgcccccgcgtaccagcagggccagaaccagctctataacgagctgaatctaggacgaagagaggagtacgatgttttggacaagagacgtggccgggaccctgagatggggggaaagccgagaaggaagaaccctcaggaaggcctgtacaatgaactgcagaaagataagatggcggaggcctacagtgagattgggatgaaaggcgagcgccggaggggcaaggggcacgatggcctttaccagggtctcagtacagccaccaaggacacctacgacgcccttcacatgcaggccctgccccctcgc

SEQ ID NO: 2835 - DNA, 1524 bp, Artificial Sequence
  Synthetic Polynucleotide
atggccttaccagtgaccgccttgctcctgccgctggccttgctgctccacgccgccaggccgcagtctgtggtcacacagcctccatccgtgtctgctgcccctggacagaaagtgaccatctcctgtagcggcagcagcagcaacatcggcaacaactacgtgtcctggtatcagcagctccccggcacagctcccaaactgctgatctacgacaacaacaagcggcccagcggcatccccgatagattttctggcagcaagagcggcaccagcgccacactgggaattaccggacttcagacaggcgacgaggccgactactactgtggcacatgggatggcagcctgtacaccatgcttttcggcggaggcaccaagctgacagtgcttggcggaggcggaagtggaggcggaggatctggcggcggaggctctgaagtgcaactggtggaatctggcggcggactggttaagcctggcggatctctgagactgtcttgtgccgccagcggcttcaccttcagcaatgcctggatgagctgggttcgacaggcccctggaaaaggactggaatgggtcggattcatccggtccaaagcctacggcggcaccacagaatatgccgcctctgtgaagggcagattcaccatcagccgggacgacagcaagtctatcgcctacctccagatgaacaacctgaaaaccgaggacaccgccgtgtactactgcgccagagatggcctgtacagcagctcttggtacgacagcgattactggggccagggcacactggtcacagtgtcatctacgcgtgagcagaaactgatctcggaagaggatctggcgaagcccaccacgacgccagcgccgcgaccaccaacaccggcgcccaccatcgcgtcgcagcccctgtccctgcgcccagaggcgtgccggccagcggcggggggcgcagtgcacacgagggggctggacttcgcctgtgacatctacatctgggcgcccttggccgggacttgtggggtccttctcctgtcactggttatcaccctttactgcaaacggggcagaaagaaactcctgtatatattcaaacaaccatttatgagaccagtacaaactactcaagaggaagatggctgtagctgccgatttccagaagaagaagaaggaggatgtgaactgagagtgaagttcagcaggagcgcagacgcccccgcgtaccagcagggccagaaccagctctataacgagctgaatctaggacgaagagaggagtacgatgttttggacaagagacgtggccgggaccctgagatggggggaaagccgagaaggaagaaccctcaggaaggcctgtacaatgaactgcagaaagataagatggcggaggcctacagtgagattgggatgaaaggcgagcgccggaggggcaaggggcacgatggcctttaccagggtctcagtacagccaccaaggacacctacgacgcccttcacatgcaggccctgccccctcgc

SEQ ID NO: 2836 - DNA, 1845 bp, Artificial Sequence
  Synthetic Polynucleotide
atgctcctgctgctcgtcccagtgctcgaggtgatttttaccctgggaggaaccagagcccagtcggtgacccagcttggcagccacgtctctgtctctgagggagccctggttctgctgaggtgcaactactcatcgtctgttccaccatatctcttctggtatgtgcaataccccaaccaaggactccagcttctcctgaagcacacaacaggggccaccctggttaaaggcatcaacggttttgaggctgaatttaagaagagtgaaacctccttccacctgacgaaaccctcagcccatatgagcgacgcggctgagtacttctgtgctgtgagtgattctagggctgcaggcaacaagctaacttttggaggaggaaccagggtgctagttaaaccaaatatccagaaccctgaccctgccgtgtaccagctgagagactctaaatccagtgacaagtctgtctgcctattcaccgattttgattctcaaacaaatgtgtcacaaagtaaggattctgatgtgtatatcacagacaaaactgtgctagacatgaggtctatggacttcaagagcaacagtgctgtggcctggagcaacaaatctgactttgcatgtgcaaacgccttcaacaacagcattattccagaagacaccttcttccccagcccagaaagttcctgtgatgtcaagctggtcgagaaaagctttgaaacagatacgaacctaaactttcaaaacctgtcagtgattgggttccgaatcctcctcctgaaagtggccgggtttaatctgctcatgacgctgcggctgtggtccagcagggccaagcgatctggatctggagcaacaaacttctcactactcaaacaagcaggtgacgtggaggagaatcccgggcctactagtatgggaatcaggctcctctgtcgtgtggccttttgtttcctggctgtaggcctcgtagatgtgaaagtaacccagagctcgagatatctagtcaaaaggacgggagagaaagtttttctggaatgtgtccaggatatggaccatgaaaatatgttctggtatcgacaagacccaggtctggggctacggctgatctatttctcatatgatgttaaaatgaaagaaaaaggagatattcctgaggggtacagtgtctctagagagaagaaggagcgcttctccctgattctggagtccgccagcaccaaccagacatctatgtacctctgtgccagcagattccccgggacagcctataattcacccctccactttgggaatgggaccaggctcactgtgacagaggacctgaacaaggtgttcccacccgaggtcgctgtgtttgagccatcagaagcagagatctcccacacccaaaaggccacactggtgtgcctggccacaggcttcttccctgaccacgtggagctgagctggtgggtgaatgggaaggaggtgcacagtggggtcagcacggacccgcagcccctcaaggagcagcccgccctcaatgactccagatactgcctgagcagccgcctgagggtctcggccaccttctggcagaacccccgcaaccacttccgctgtcaagtccagttctacgggctctcggagaatgacgagtggacccaggatagggccaaacccgtcacccagatcgtcagcgccgaggcctggggtagagcagactgtggctttacctcggtgtcctaccagcaaggggtcctgtctgccaccatcctctatgagatcctgctagggaaggccaccctgtatgctgtgctggtcagcgcccttgtgttgatggccatggtcaagagaaaggatttc

SEQ ID NO: 2837 - DNA, 20 bp, Artificial Sequence
  Synthetic Polynucleotide
  misc_feature (1)..(20): n is a, c, g, or t
nnnnnnnnnnnnnnnnnnnn

SEQ ID NO: 2838 - DNA, 20 bp, Artificial Sequence
  Synthetic Polynucleotide
  misc_feature (1)..(20): n is a, c, g, or t
nnnnnnnnnnnnnnnnnnnn

SEQ ID NO: 2839 - DNA, 20 bp, Artificial Sequence
  Synthetic Polynucleotide
  misc_feature (1)..(20): n is a, c, g, or t
nnnnnnnnnnnnnnnnnnnn

SEQ ID NO: 2840 - DNA, 20 bp, Artificial Sequence
  Synthetic Polynucleotide
  misc_feature (1)..(20): n is a, c, g, or t
nnnnnnnnnnnnnnnnnnnn

SEQ ID NO: 2841 - DNA, 20 bp, Artificial Sequence
  Synthetic Polynucleotide
  misc_feature (1)..(20): n is a, c, g, or t
nnnnnnnnnnnnnnnnnnnn

SEQ ID NO: 2842 - DNA, 20 bp, Artificial Sequence
  Synthetic Polynucleotide
  misc_feature (1)..(20): n is a, c, g, or t
nnnnnnnnnnnnnnnnnnnn

SEQ ID NO: 2843 - DNA, 20 bp, Artificial Sequence
  Synthetic Polynucleotide
  misc_feature (1)..(20): n is a, c, g, or t
nnnnnnnnnnnnnnnnnnnn

SEQ ID NO: 2844 - DNA, 20 bp, Artificial Sequence
  Synthetic Polynucleotide
  misc_feature (1)..(20): n is a, c, g, or t
nnnnnnnnnnnnnnnnnnnn

SEQ ID NO: 2845 - DNA, 20 bp, Artificial Sequence
  Synthetic Polynucleotide
  misc_feature (1)..(20): n is a, c, g, or t
nnnnnnnnnnnnnnnnnnnn

SEQ ID NO: 2846 - DNA, 20 bp, Artificial Sequence
  Synthetic Polynucleotide
  misc_feature (1)..(20): n is a, c, g, or t
nnnnnnnnnnnnnnnnnnnn

SEQ ID NO: 2847 - DNA, 20 bp, Artificial Sequence
  Synthetic Polynucleotide
  misc_feature (1)..(20): n is a, c, g, or t
nnnnnnnnnnnnnnnnnnnn

SEQ ID NO: 2848 - DNA, 20 bp, Artificial Sequence
  Synthetic Polynucleotide
  misc_feature (1)..(20): n is a, c, g, or t
nnnnnnnnnnnnnnnnnnnn

SEQ ID NO: 2849 - DNA, 20 bp, Artificial Sequence
  Synthetic Polynucleotide
  misc_feature (1)..(20): n is a, c, g, or t
nnnnnnnnnnnnnnnnnnnn

SEQ ID NO: 2850 - DNA, 20 bp, Artificial Sequence
  Synthetic Polynucleotide
  misc_feature (1)..(20): n is a, c, g, or t
nnnnnnnnnnnnnnnnnnnn

SEQ ID NO: 2851 - DNA, 1563 bp, Artificial Sequence
  Synthetic Polynucleotide
atggccttaccagtgaccgccttgctcctgccgctggccttgctgctccacgccgccaggccggagctggtcatgacacagagccctgcttctctggccgtgtcactgggacagagagccaccatctcttgcagagccagcgagagcgtggacagctacggcaagagcttcatgcactggtatcagctcaagcccggccagcctcctaagctgctgatctacagagcctccaacctggaaagcggcgtgccagccagattttctggcagcggcagcagaaccgacttcaccctgaccattgatcccgtggaagccgatgatgccgccacctactactgccagcagaacaacgaggacccctggacatttggcggaggcaccaagctggaaatcaaaggcggaggcggaagtggaggcggaggatctggcggcggaggctctgaagtgcagctcgaacagtctggccccgagcttgtgaaacctggcgcttccgtgaagatgagctgcaaggccagcggctacaccttcaccaactactacatgaaatgggtcaagcagagccacggcaagtccctggaatggatcggcgatctgaaccccaacaacggcgacaccttctacaaccagaagttcaagggcaaagccacactgaccgtggacaagagcagcaacaccgcctacatgcagctcaactccctgaccagcgaggacagcgccgtgtactactgtgccagaaccggcagatacgaagagaacgctatggactactggggccagggcacaagcgtgacagtctcttctacgcgtacgcgtggaggtggtggctccgaagtgcagctggttcagtctggggccgaagtgaagaagcctggcgagagcctgcggatcagctgtaaaggcagcggctacagcttcagcacctactggatctcttgggtccgacagatgcccggcaaaggactggaatggatgggcaagatctaccccggcgacagctacaccaactacagccctagcttccagggccaagtgaccatcagcgccgacaagagcatcagcacagcctacctccagtggtcctctctgaaggccagcgacaccgccatgtactactgtgccagaggctacggcatcttcgactattggggccagggcaccctggtcacagtttctagcggaggcggaggatctggtggcggaggaagtggcggaggcggttcttcttatgagctgacccagcctccaagcgtgtccgtgtctcctggacagacagccagcatcacctgtagcggcgacaacatcggcgatcagtacgcccactggtatcagcagaagcccggacagtctcccgtgctggtcatctaccaggacaagaacagacccagcggcatccccgagagattcagcggcagcaatagcggcaataccgccacactgacaatcagcggcacccaggctatggacgaggccgattactactgcgccacctacacaggcttcggcagcctggctgtttttggaggcggcaccaaactgaccgtgctgcatcaccaccatcaccac

SEQ ID NO: 2852 - protein, 521 aa, Artificial Sequence
  Synthetic Polypeptide
MALPVTALLLPLALLLHAARPELVMTQSPASLAVSLGQRATISCRASESVDSYGKSFMHWYQLKPGQPPKLLIYRASNLESGVPARFSGSGSRTDFTLTIDPVEADDAATYYCQQNNEDPWTFGGGTKLEIKGGGGSGGGGSGGGGSEVQLEQSGPELVKPGASVKMSCKASGYTFTNYYMKWVKQSHGKSLEWIGDLNPNNGDTFYNQKFKGKATLTVDKSSNTAYMQLNSLTSEDSAVYYCARTGRYEENAMDYWGQGTSVTVSSTRTRGGGGSEVQLVQSGAEVKKPGESLRISCKGSGYSFSTYWISWVRQMPGKGLEWMGKIYPGDSYTNYSPSFQGQVTISADKSISTAYLQWSSLKASDTAMYYCARGYGIFDYWGQGTLVTVSSGGGGSGGGGSGGGGSSYELTQPPSVSVSPGQTASITCSGDNIGDQYAHWYQQKPGQSPVLVIYQDKNRPSGIPERFSGSNSGNTATLTISGTQAMDEADYYCATYTGFGSLAVFGGGTKLTVLHHHHHH

SEQ ID NO: 2853 - DNA, 2907 bp, Artificial Sequence
  Synthetic Polynucleotide
atggccttaccagtgaccgccttgctcctgccgctggccttgctgctccacgccgccaggccggacatccagatgacacagactacatcctccctgtctgcctctctgggagacagagtcaccatcagttgcagggcaagtcaggacattagtaaatatttaaattggtatcagcagaaaccagatggaactgttaaactcctgatctaccatacatcaagattacactcaggagtcccatcaaggttcagtggcagtgggtctggaacagattattctctcaccattagcaacctggagcaagaagatattgccacttacttttgccaacagggtaatacgcttccgtacacgttcggaggggggaccaagctggagatcacaggtggcggtggctcgggcggtggtgggtcgggtggcggcggatctgaggtgaaactgcaggagtcaggacctggcctggtggcgccctcacagagcctgtccgtcacatgcactgtctcaggggtctcattacccgactatggtgtaagctggattcgccagcctccacgaaagggtctggagtggctgggagtaatatggggtagtgaaaccacatactataattcagctctcaaatccagactgaccatcatcaaggacaactccaagagccaagttttcttaaaaatgaacagtctgcaaactgatgacacagccatttactactgtgccaaacattattactacggtggtagctatgctatggactactggggtcaaggaacctcagtcaccgtctcctcacgcgtagagcagaaactgatctcggaagaggatctggcgaagcccaccacgacgccagcgccgcgaccaccaacaccggcgcccaccatcgcgtcgcagcccctgtccctgcgcccagaggcgtgccggccagcggcggggggcgcagtgcacacgagggggctggacttcgcctgtgacatctacatctgggcgcccttggccgggacttgtggggtccttctcctgtcactggttatcaccctttactgcaaacggggcagaaagaaactcctgtatatattcaaacaaccatttatgagaccagtacaaactactcaagaggaagatggctgtagctgccgatttccagaagaagaagaaggaggatgtgaactgagagtgaagttcagcaggagcgcagacgcccccgcgtaccagcagggccagaaccagctctataacgagctgaatctaggacgaagagaggagtacgatgttttggacaagagacgtggccgggaccctgagatggggggaaagccgagaaggaagaaccctcaggaaggcctgtacaatgaactgcagaaagataagatggcggaggcctacagtgagattgggatgaaaggcgagcgccggaggggcaaggggcacgatggcctttaccagggtctcagtacagccaccaaggacacctacgacgcccttcacatgcaggccctgccccctcgctctagtggctccggcgagggcagaggaagtctactaacctgcggagatgtggaagaaaatcctggcccacatatggaacaacggggacagaacgccccggccgcttcgggggcccggaaaaggcacggcccaggacccagggaggcgcggggagccaggcctgggccccgggtccccaagacccttgtgctcgttgtcgccgcggtcctgctgttggtctcagctgagtctgctctgatcacccaacaagacctagctccccagcagagagcggccccacaacaaaagaggtccagcccctcagagggattgtgtccacctggacaccatatctcagaagacggtagagattgcatctcctgcaaatatggacaggactatagcactcactggaatgacctccttttctgcttgcgctgcaccaggtgtgattcaggtgaagtggagctaagtccctgcaccacgaccagaaacacagtgtgtcagtgcgaagaaggcaccttccgggaagaagattctcctgagatgtgccggaagtgccgcacagggtgtcccagagggatggtcaaggtcggtgattgtacaccctggagtgacatcgaatgtgtccacaaagaatcaggtacaaagcacagtggggaagtcccagctgtggaggagacggtgacctccagcccagggactcctgcctctccctgttctgggggcagtggctcttgtgacaaaactcacacatgcccaccgtgcccagcacctgaactcctggggggaccgtcagtcttcctcttccccccaaaacccaaggacaccctcatgatctcccggacccctgaggtcacatgcgtggtggtggacgtgagccacgaagaccctgaggtcaagttcaactggtacgtggacggcgtggaggtgcataatgccaagacaaagccgcgggaggagcagtacaacagcacgtaccgggtggtcagcgtcctcaccgtcctgcaccaggactggctgaatggcaaggagtacaagtgcaaggtctccaacaaagccctcccagcccccatcgagaaaaccatctccaaagccaaagggcagccccgagaaccacaggtgtacaccctgcccccatcccgggatgagctgaccaagaaccaggtcagcctgacctgcctggtcaaaggcttctatcccagcgacatcgccgtggagtgggagagcaatgggcagccggagaacaactacaagaccacgcctcccgtgctggactccgacggctccttcttcctctacagcaagctcaccgtggacaagagcaggtggcagcaggggaacgtcttctcatgctccgtgatgcatgaggctctgcacaaccactacacgcagaagagcctctccctgtctccgggtaaatga

SEQ ID NO: 2854 - DNA, 3381 bp, Artificial Sequence
  Synthetic Polynucleotide
atggccttaccagtgaccgccttgctcctgccgctggccttgctgctccacgccgccaggccggacatccagatgacacagactacatcctccctgtctgcctctctgggagacagagtcaccatcagttgcagggcaagtcaggacattagtaagtacctgaactggtatcagcagaaaccagatggaactgttaaactcctgatctaccatacatcaagattacactcaggagtcccatcaaggttcagtggcagtgggtctggaacagattattctctcaccattagcaacctggagcaagaagatattgccacttacttttgccaacagggtaatacgcttccgtacacgttcggaggggggaccaagctggagatcacactcgaggggaaaccaattcccaaccctcttctgggactggattcaaccggcagcggcgaggacctgaagaacgtgttcccacctgaggtggccgtgttcgagcctagcaaggccgagatcgcccacacccagaaagccaccctcgtgtgcctggctaccggcttctaccccgaccatgtggaactgtcttggtgggtcaacggcaaagaggtgcacagcggcgtgtgtaccgacccccagccactgaaagaacagcccgccctgaacgacagccggtactgcctgagcagcagactgagagtgtccgccaccttctggcagaacccccggaaccacttcagatgccaggtgcagttctacggcctgagcgagaacgacgagtggacccaggacagagccaagcccgtgacccagatcgtgtctgccgaagcctggggcagagccgattgcggcatcaccagcgccagctaccaccagggcgtgctgagcgccaccatcctgtacgagatcctgctgggcaaggccaccctgtacgccgtgctggtgtctgccctggtgctgatggctatggtcaagcggaaggacagccggggaagggccaagcgatctggatctggagcaacaaacttctcactactcaaacaagcaggtgacgtggaggagaatcccgggcctactagtatggactggatttggcgcatccttttccttgtcggcgctgctaccggcgcgcattccttcgaagtgaaactgcaggagtcaggacctggcctggtggcgccctcacagagcctgtccgtcacatgcactgtctcaggggtctcattacccgactatggtgtaagctggattcgccagcctccacgaaagggtctggagtggctgggagtaatatggggtagtgaaaccacatactataattcagctctcaaatccagactgaccatcatcaaggacaactccaagagccaagttttcttaaaaatgaacagtctgcaaactgatgacacagccatttactactgtgccaaacattattactacggtggtagctatgctatggactactggggccaaggaacctcagtcaccgtctcctcaacgcgtgagcagaaactgatctcggaagaggatgggagcggcatccagaaccctgatcctgccgtgtaccagctgcgggatagcaagagcagcgacaagagcgtgtgtctgttcaccgacttcgacagccagaccaacgtgtcccagagcaaggactccgacgtgtacatcaccgataagtgcgtgctggacatgcggagcatggacttcaagagcaactccgccgtggcctggtccaacaagtccgatttcgcctgcgccaacgccttcaacaacagcattatccccgaggacacattcttcccaagcagcgacgtgccctgcgacgtgaagctggtggaaaagagcttcgagacagacaccaacctgaacttccagaacctgagcgtgatcggcttcagaatcctgctgctgaaagtggccggctttaacctgctgatgaccctgcggctgtggtccagccgcgccaagagaagcggatctggcgtgaagcagaccctgaatttcgacctgctgaagctggctggcgacgtggaatccaacccaggcccttctagaggccatatggaacaacggggacagaacgccccggccgcttcgggggcccggaaaaggcacggcccaggacccagggaggcgcggggagccaggcctgggccccgggtccccaagacccttgtgctcgttgtcgccgcggtcctgctgttggtctcagctgagtctgctctgatcacccaacaagacctagctccccagcagagagcggccccacaacaaaagaggtccagcccctcagagggattgtgtccacctggacaccatatctcagaagacggtagagattgcatctcctgcaaatatggacaggactatagcactcactggaatgacctccttttctgcttgcgctgcaccaggtgtgattcaggtgaagtggagctaagtccctgcaccacgaccagaaacacagtgtgtcagtgcgaagaaggcaccttccgggaagaagattctcctgagatgtgccggaagtgccgcacagggtgtcccagagggatggtcaaggtcggtgattgtacaccctggagtgacatcgaatgtgtccacaaagaatcaggtacaaagcacagtggggaagtcccagctgtggaggagacggtgacctccagcccagggactcctgcctctccctgttctgggggcagtggctcttgtgacaaaactcacacatgcccaccgtgcccagcacctgaactcctggggggaccgtcagtcttcctcttccccccaaaacccaaggacaccctcatgatctcccggacccctgaggtcacatgcgtggtggtggacgtgagccacgaagaccctgaggtcaagttcaactggtacgtggacggcgtggaggtgcataatgccaagacaaagccgcgggaggagcagtacaacagcacgtaccgggtggtcagcgtcctcaccgtcctgcaccaggactggctgaatggcaaggagtacaagtgcaaggtctccaacaaagccctcccagcccccatcgagaaaaccatctccaaagccaaagggcagccccgagaaccacaggtgtacaccctgcccccatcccgggatgagctgaccaagaaccaggtcagcctgacctgcctggtcaaaggcttctatcccagcgacatcgccgtggagtgggagagcaatgggcagccggagaacaactacaagaccacgcctcccgtgctggactccgacggctccttcttcctctacagcaagctcaccgtggacaagagcaggtggcagcaggggaacgtcttctcatgctccgtgatgcatgaggctctgcacaaccactacacgcagaagagcctctccctgtctccgggtaaatga

SEQ ID NO: 2855 - DNA, 2799 bp, Artificial Sequence
  Synthetic Polynucleotide
atggccttaccagtgaccgccttgctcctgccgctggccttgctgctccacgccgccaggccggacatccagatgacacagactacatcctccctgtctgcctctctgggagacagagtcaccatcagttgcagggcaagtcaggacattagtaaatatttaaattggtatcagcagaaaccagatggaactgttaaactcctgatctaccatacatcaagattacactcaggagtcccatcaaggttcagtggcagtgggtctggaacagattattctctcaccattagcaacctggagcaagaagatattgccacttacttttgccaacagggtaatacgcttccgtacacgttcggaggggggaccaagctggagatcacaggtggcggtggctcgggcggtggtgggtcgggtggcggcggatctgaggtgaaactgcaggagtcaggacctggcctggtggcgccctcacagagcctgtccgtcacatgcactgtctcaggggtctcattacccgactatggtgtaagctggattcgccagcctccacgaaagggtctggagtggctgggagtaatatggggtagtgaaaccacatactataattcagctctcaaatccagactgaccatcatcaaggacaactccaagagccaagttttcttaaaaatgaacagtctgcaaactgatgacacagccatttactactgtgccaaacattattactacggtggtagctatgctatggactactggggtcaaggaacctcagtcaccgtctcctcacgcgtagagcagaaactgatctcggaagaggatctggcgaagcccaccacgacgccagcgccgcgaccaccaacaccggcgcccaccatcgcgtcgcagcccctgtccctgcgcccagaggcgtgccggccagcggcggggggcgcagtgcacacgagggggctggacttcgcctgtgacatctacatctgggcgcccttggccgggacttgtggggtccttctcctgtcactggttatcaccctttactgcgggcgcgccagagtgaagttcagcaggagcgcagacgcccccgcgtaccagcagggccagaaccagctctataacgagctgaatctaggacgaagagaggagtacgatgttttggacaagagacgtggccgggaccctgagatggggggaaagccgagaaggaagaaccctcaggaaggcctgtacaatgaactgcagaaagataagatggcggaggcctacagtgagattgggatgaaaggcgagcgccggaggggcaaggggcacgatggcctttaccagggtctcagtacagccaccaaggacacctacgacgcccttcacatgcaggccctgccccctcgctctagaggatctggagcaacaaacttctcactactcaaacaagcaggtgacgtggaggagaatcccgggcctgggatccacatggaacaacggggacagaacgccccggccgcttcgggggcccggaaaaggcacggcccaggacccagggaggcgcggggagccaggcctgggccccgggtccccaagacccttgtgctcgttgtcgccgcggtcctgctgttggtctcagctgagtctgctctgatcacccaacaagacctagctccccagcagagagcggccccacaacaaaagaggtccagcccctcagagggattgtgtccacctggacaccatatctcagaagacggtagagattgcatctcctgcaaatatggacaggactatagcactcactggaatgacctccttttctgcttgcgctgcaccaggtgtgattcaggtgaagtggagctaagtccctgcaccacgaccagaaacacagtgtgtcagtgcgaagaaggcaccttccgggaagaagattctcctgagatgtgccggaagtgccgcacagggtgtcccagagggatggtcaaggtcggtgattgtacaccctggagtgacatcgaatgtgtccacaaagaatcaggtacaaagcacagtggggaagtcccagctgtggaggagacggtgacctccagcccagggactcctgcctctccctgttctgggggcagtggctcttgtgacaaaactcacacatgcccaccgtgcccagcacctgaactcctggggggaccgtcagtcttcctcttccccccaaaacccaaggacaccctcatgatctcccggacccctgaggtcacatgcgtggtggtggacgtgagccacgaagaccctgaggtcaagttcaactggtacgtggacggcgtggaggtgcataatgccaagacaaagccgcgggaggagcagtacaacagcacgtaccgggtggtcagcgtcctcaccgtcctgcaccaggactggctgaatggcaaggagtacaagtgcaaggtctccaacaaagccctcccagcccccatcgagaaaaccatctccaaagccaaagggcagccccgagaaccacaggtgtacaccctgcccccatcccgggatgagctgaccaagaaccaggtcagcctgacctgcctggtcaaaggcttctatcccagcgacatcgccgtggagtgggagagcaatgggcagccggagaacaactacaagaccacgcctcccgtgctggactccgacggctccttcttcctctacagcaagctcaccgtggacaagagcaggtggcagcaggggaacgtcttctcatgctccgtgatgcatgaggctctgcacaaccactacacgcagaagagcctctccctgtctccgggtaaatga

SEQ ID NO: 2856 - DNA, 2763 bp, Artificial Sequence
  Synthetic Polynucleotide
atggccttaccagtgaccgccttgctcctgccgctggccttgctgctccacgccgccaggccggacatccagatgacacagactacatcctccctgtctgcctctctgggagacagagtcaccatcagttgcagggcaagtcaggacattagtaaatatttaaattggtatcagcagaaaccagatggaactgttaaactcctgatctaccatacatcaagattacactcaggagtcccatcaaggttcagtggcagtgggtctggaacagattattctctcaccattagcaacctggagcaagaagatattgccacttacttttgccaacagggtaatacgcttccgtacacgttcggaggggggaccaagctggagatcacaggtggcggtggctcgggcggtggtgggtcgggtggcggcggatctgaggtgaaactgcaggagtcaggacctggcctggtggcgccctcacagagcctgtccgtcacatgcactgtctcaggggtctcattacccgactatggtgtaagctggattcgccagcctccacgaaagggtctggagtggctgggagtaatatggggtagtgaaaccacatactataattcagctctcaaatccagactgaccatcatcaaggacaactccaagagccaagttttcttaaaaatgaacagtctgcaaactgatgacacagccatttactactgtgccaaacattattactacggtggtagctatgctatggactactggggtcaaggaacctcagtcaccgtctcctcacgcgtagacggtaacgaggagatgggaggaatcactcaaaccccttacaaagtctcaatttcaggaacaactgttatccttacatgtccccagtatcctggcagcgagatcctttggcagcataacgacaagaatatagggggagatgaagacgataagaatatcggatctgacgaggatcacttgagcctgaaagagttctccgagcttgaacaaagcggatattatgtgtgctatccgcgcgggtcaaagccggaagacgctaacttttacctttatctccgagccagagtgtgcgaaaattgcatggaaatggacgttatgtccgttgctacaatagttatcgtagatatatgcatcacgggtggactgcttctgctggtttattattggtccaagaatagaaaggccaaagctaaacccgtgaccagaggcgctggcgcaggcggaaggcaaaggggacaaaacaaagaacggccaccaccagtgccaaatccagattatgagcctattcggaaaggacagagggacctgtactctggcctgaatcagagaagaatctctagaggatctggagcaacaaacttctcactactcaaacaagcaggtgacgtggaggagaatcccgggcctgggatccacatggaacaacggggacagaacgccccggccgcttcgggggcccggaaaaggcacggcccaggacccagggaggcgcggggagccaggcctgggccccgggtccccaagacccttgtgctcgttgtcgccgcggtcctgctgttggtctcagctgagtctgctctgatcacccaacaagacctagctccccagcagagagcggccccacaacaaaagaggtccagcccctcagagggattgtgtccacctggacaccatatctcagaagacggtagagattgcatctcctgcaaatatggacaggactatagcactcactggaatgacctccttttctgcttgcgctgcaccaggtgtgattcaggtgaagtggagctaagtccctgcaccacgaccagaaacacagtgtgtcagtgcgaagaaggcaccttccgggaagaagattctcctgagatgtgccggaagtgccgcacagggtgtcccagagggatggtcaaggtcggtgattgtacaccctggagtgacatcgaatgtgtccacaaagaatcaggtacaaagcacagtggggaagtcccagctgtggaggagacggtgacctccagcccagggactcctgcctctccctgttctgggggcagtggctcttgtgacaaaactcacacatgcccaccgtgcccagcacctgaactcctggggggaccgtcagtcttcctcttccccccaaaacccaaggacaccctcatgatctcccggacccctgaggtcacatgcgtggtggtggacgtgagccacgaagaccctgaggtcaagttcaactggtacgtggacggcgtggaggtgcataatgccaagacaaagccgcgggaggagcagtacaacagcacgtaccgggtggtcagcgtcctcaccgtcctgcaccaggactggctgaatggcaaggagtacaagtgcaaggtctccaacaaagccctcccagcccccatcgagaaaaccatctccaaagccaaagggcagccccgagaaccacaggtgtacaccctgcccccatcccgggatgagctgaccaagaaccaggtcagcctgacctgcctggtcaaaggcttctatcccagcgacatcgccgtggagtgggagagcaatgggcagccggagaacaactacaagaccacgcctcccgtgctggactccgacggctccttcttcctctacagcaagctcaccgtggacaagagcaggtggcagcaggggaacgtcttctcatgctccgtgatgcatgaggctctgcacaaccactacacgcagaagagcctctccctgtctccgggtaaatga

SEQ ID NO: 2857 - DNA, 2658 bp, Artificial Sequence
  Synthetic Polynucleotide
atggccttaccagtgaccgccttgctcctgccgctggccttgctgctccacgccgccaggccggacatccagatgacacagactacatcctccctgtctgcctctctgggagacagagtcaccatcagttgcagggcaagtcaggacattagtaaatatttaaattggtatcagcagaaaccagatggaactgttaaactcctgatctaccatacatcaagattacactcaggagtcccatcaaggttcagtggcagtgggtctggaacagattattctctcaccattagcaacctggagcaagaagatattgccacttacttttgccaacagggtaatacgcttccgtacacgttcggaggggggaccaagctggagatcacaggtggcggtggctcgggcggtggtgggtcgggtggcggcggatctgaggtgaaactgcaggagtcaggacctggcctggtggcgccctcacagagcctgtccgtcacatgcactgtctcaggggtctcattacccgactatggtgtaagctggattcgccagcctccacgaaagggtctggagtggctgggagtaatatggggtagtgaaaccacatactataattcagctctcaaatccagactgaccatcatcaaggacaactccaagagccaagttttcttaaaaatgaacagtctgcaaactgatgacacagccatttactactgtgccaaacattattactacggtggtagctatgctatggactactggggtcaaggaacctcagtcaccgtctcctcacgcgtattcaagatccccatcgaggaactggaagatcgggtgttcgtgaactgcaacacctctatcacctgggtggaaggcaccgtgggaacactgctgagcgacatcaccagactggacctcggcaagcggattctggaccctcggggcatctacagatgcaacggcaccgacatctacaaggacaaagaaagcaccgtgcaggtccactacagaatgtgccagtcctgcgtggaactggaccctgctacagtggccggcatcatcgtgaccgatgtgatcgctactctgctgctggctctgggagtgttctgcttcgccggacacgaaacaggcagactgtctggcgctgccgatacacaggccctgctgagaaacgaccaagtgtatcagcccctgcgcgacagagatgatgcccagtattctcacctcggcggcaactgggctagaaacaagtctagaggatctggagcaacaaacttctcactactcaaacaagcaggtgacgtggaggagaatcccgggcctgggatccacatggaacaacggggacagaacgccccggccgcttcgggggcccggaaaaggcacggcccaggacccagggaggcgcggggagccaggcctgggccccgggtccccaagacccttgtgctcgttgtcgccgcggtcctgctgttggtctcagctgagtctgctctgatcacccaacaagacctagctccccagcagagagcggccccacaacaaaagaggtccagcccctcagagggattgtgtccacctggacaccatatctcagaagacggtagagattgcatctcctgcaaatatggacaggactatagcactcactggaatgacctccttttctgcttgcgctgcaccaggtgtgattcaggtgaagtggagctaagtccctgcaccacgaccagaaacacagtgtgtcagtgcgaagaaggcaccttccgggaagaagattctcctgagatgtgccggaagtgccgcacagggtgtcccagagggatggtcaaggtcggtgattgtacaccctggagtgacatcgaatgtgtccacaaagaatcaggtacaaagcacagtggggaagtcccagctgtggaggagacggtgacctccagcccagggactcctgcctctccctgttctgggggcagtggctcttgtgacaaaactcacacatgcccaccgtgcccagcacctgaactcctggggggaccgtcagtcttcctcttccccccaaaacccaaggacaccctcatgatctcccggacccctgaggtcacatgcgtggtggtggacgtgagccacgaagaccctgaggtcaagttcaactggtacgtggacggcgtggaggtgcataatgccaagacaaagccgcgggaggagcagtacaacagcacgtaccgggtggtcagcgtcctcaccgtcctgcaccaggactggctgaatggcaaggagtacaagtgcaaggtctccaacaaagccctcccagcccccatcgagaaaaccatctccaaagccaaagggcagccccgagaaccacaggtgtacaccctgcccccatcccgggatgagctgaccaagaaccaggtcagcctgacctgcctggtcaaaggcttctatcccagcgacatcgccgtggagtgggagagcaatgggcagccggagaacaactacaagaccacgcctcccgtgctggactccgacggctccttcttcctctacagcaagctcaccgtggacaagagcaggtggcagcaggggaacgtcttctcatgctccgtgatgcatgaggctctgcacaaccactacacgcagaagagcctctccctgtctccgggtaaatga

SEQ ID NO: 2858 - DNA, 2688 bp, Artificial Sequence
  Synthetic Polynucleotide
atggccttaccagtgaccgccttgctcctgccgctggccttgctgctccacgccgccaggccggacatccagatgacacagactacatcctccctgtctgcctctctgggagacagagtcaccatcagttgcagggcaagtcaggacattagtaaatatttaaattggtatcagcagaaaccagatggaactgttaaactcctgatctaccatacatcaagattacactcaggagtcccatcaaggttcagtggcagtgggtctggaacagattattctctcaccattagcaacctggagcaagaagatattgccacttacttttgccaacagggtaatacgcttccgtacacgttcggaggggggaccaagctggagatcacaggtggcggtggctcgggcggtggtgggtcgggtggcggcggatctgaggtgaaactgcaggagtcaggacctggcctggtggcgccctcacagagcctgtccgtcacatgcactgtctcaggggtctcattacccgactatggtgtaagctggattcgccagcctccacgaaagggtctggagtggctgggagtaatatggggtagtgaaaccacatactataattcagctctcaaatccagactgaccatcatcaaggacaactccaagagccaagttttcttaaaaatgaacagtctgcaaactgatgacacagccatttactactgtgccaaacattattactacggtggtagctatgctatggactactggggtcaaggaacctcagtcaccgtctcctcacgcgtacagagcatcaagggcaaccacctggtcaaggtgtacgactaccaagaggacggcagcgtgctgctgacatgtgatgccgaggccaagaacatcacctggtttaaggacggcaagatgatcggcttcctgaccgaggacaagaagaagtggaacctgggcagcaacgctaaggaccccagaggcatgtatcagtgcaagggcagccagaacaagagcaagcccctccaggtgtactaccggatgtgccagaactgcatcgagctgaacgccgctaccatcagcggctttctgttcgccgagatcgtgtccatcttcgtgctggccgtgggcgtgtactttatcgctggacaggatggcgtgcggcagagcagagcttccgataagcaaaccctgctgcctaacgaccagctgtaccagcctctgaaggacagagaggacgaccagtacagccacctccagggcaatcagctgagaagaaactctagaggatctggagcaacaaacttctcactactcaaacaagcaggtgacgtggaggagaatcccgggcctgggatccacatggaacaacggggacagaacgccccggccgcttcgggggcccggaaaaggcacggcccaggacccagggaggcgcggggagccaggcctgggccccgggtccccaagacccttgtgctcgttgtcgccgcggtcctgctgttggtctcagctgagtctgctctgatcacccaacaagacctagctccccagcagagagcggccccacaacaaaagaggtccagcccctcagagggattgtgtccacctggacaccatatctcagaagacggtagagattgcatctcctgcaaatatggacaggactatagcactcactggaatgacctccttttctgcttgcgctgcaccaggtgtgattcaggtgaagtggagctaagtccctgcaccacgaccagaaacacagtgtgtcagtgcgaagaaggcaccttccgggaagaagattctcctgagatgtgccggaagtgccgcacagggtgtcccagagggatggtcaaggtcggtgattgtacaccctggagtgacatcgaatgtgtccacaaagaatcaggtacaaagcacagtggggaagtcccagctgtggaggagacggtgacctccagcccagggactcctgcctctccctgttctgggggcagtggctcttgtgacaaaactcacacatgcccaccgtgcccagcacctgaactcctggggggaccgtcagtcttcctcttccccccaaaacccaaggacaccctcatgatctcccggacccctgaggtcacatgcgtggtggtggacgtgagccacgaagaccctgaggtcaagttcaactggtacgtggacggcgtggaggtgcataatgccaagacaaagccgcgggaggagcagtacaacagcacgtaccgggtggtcagcgtcctcaccgtcctgcaccaggactggctgaatggcaaggagtacaagtgcaaggtctccaacaaagccctcccagcccccatcgagaaaaccatctccaaagccaaagggcagccccgagaaccacaggtgtacaccctgcccccatcccgggatgagctgaccaagaaccaggtcagcctgacctgcctggtcaaaggcttctatcccagcgacatcgccgtggagtgggagagcaatgggcagccggagaacaactacaagaccacgcctcccgtgctggactccgacggctccttcttcctctacagcaagctcaccgtggacaagagcaggtggcagcaggggaacgtcttctcatgctccgtgatgcatgaggctctgcacaaccactacacgcagaagagcctctccctgtctccgggtaaatga

SEQ ID NO: 2859 - DNA, 2637 bp, Artificial Sequence
  Synthetic Polynucleotide
atggccttaccagtgaccgccttgctcctgccgctggccttgctgctccacgccgccaggccggacatccagatgacacagactacatcctccctgtctgcctctctgggagacagagtcaccatcagttgcagggcaagtcaggacattagtaaatatttaaattggtatcagcagaaaccagatggaactgttaaactcctgatctaccatacatcaagattacactcaggagtcccatcaaggttcagtggcagtgggtctggaacagattattctctcaccattagcaacctggagcaagaagatattgccacttacttttgccaacagggtaatacgcttccgtacacgttcggaggggggaccaagctggagatcacaggtggcggtggctcgggcggtggtgggtcgggtggcggcggatctgaggtgaaactgcaggagtcaggacctggcctggtggcgccctcacagagcctgtccgtcacatgcactgtctcaggggtctcattacccgactatggtgtaagctggattcgccagcctccacgaaagggtctggagtggctgggagtaatatggggtagtgaaaccacatactataattcagctctcaaatccagactgaccatcatcaaggacaactccaagagccaagttttcttaaaaatgaacagtctgcaaactgatgacacagccatttactactgtgccaaacattattactacggtggtagctatgctatggactactggggtcaaggaacctcagtcaccgtctcctcacgcgtacagagttttgggttgttggaccctaaattgtgctatctgttggacggaatcctgttcatttacggagtgatcctgaccgcattgttcctgcgggttaagttttccagatccgcagacgcacccgcttaccaacaagggcagaaccaactctacaatgaacttaatttggggcggagggaagagtacgacgttctggacaaaaggaggggacgagatcccgagatgggcggaaagcctcagcgaaggaagaatccgcaagaggggctttataacgaactccagaaagataaaatggcagaagcctatagtgagattgggatgaagggagaaaggaggaggggtaaaggtcacgatgggttgtaccaaggattgagcacagccactaaagatacctatgatgcgctccacatgcaggccctgccgccaagatctagaggatctggagcaacaaacttctcactactcaaacaagcaggtgacgtggaggagaatcccgggcctgggatccacatggaacaacggggacagaacgccccggccgcttcgggggcccggaaaaggcacggcccaggacccagggaggcgcggggagccaggcctgggccccgggtccccaagacccttgtgctcgttgtcgccgcggtcctgctgttggtctcagctgagtctgctctgatcacccaacaagacctagctccccagcagagagcggccccacaacaaaagaggtccagcccctcagagggattgtgtccacctggacaccatatctcagaagacggtagagattgcatctcctgcaaatatggacaggactatagcactcactggaatgacctccttttctgcttgcgctgcaccaggtgtgattcaggtgaagtggagctaagtccctgcaccacgaccagaaacacagtgtgtcagtgcgaagaaggcaccttccgggaagaagattctcctgagatgtgccggaagtgccgcacagggtgtcccagagggatggtcaaggtcggtgattgtacaccctggagtgacatcgaatgtgtccacaaagaatcaggtacaaagcacagtggggaagtcccagctgtggaggagacggtgacctccagcccagggactcctgcctctccctgttctgggggcagtggctcttgtgacaaaactcacacatgcccaccgtgcccagcacctgaactcctggggggaccgtcagtcttcctcttccccccaaaacccaaggacaccctcatgatctcccggacccctgaggtcacatgcgtggtggtggacgtgagccacgaagaccctgaggtcaagttcaactggtacgtggacggcgtggaggtgcataatgccaagacaaagccgcgggaggagcagtacaacagcacgtaccgggtggtcagcgtcctcaccgtcctgcaccaggactggctgaatggcaaggagtacaagtgcaaggtctccaacaaagccctcccagcccccatcgagaaaaccatctccaaagccaaagggcagccccgagaaccacaggtgtacaccctgcccccatcccgggatgagctgaccaagaaccaggtcagcctgacctgcctggtcaaaggcttctatcccagcgacatcgccgtggagtgggagagcaatgggcagccggagaacaactacaagaccacgcctcccgtgctggactccgacggctccttcttcctctacagcaagctcaccgtggacaagagcaggtggcagcaggggaacgtcttctcatgctccgtgatgcatgaggctctgcacaaccactacacgcagaagagcctctccctgtctccgggtaaatga

SEQ ID NO: 2860 - DNA, 3303 bp, Artificial Sequence
  Synthetic Polynucleotide
atggccttaccagtgaccgccttgctcctgccgctggccttgctgctccacgccgccaggccggacatccagatgacacagactacatcctccctgtctgcctctctgggagacagagtcaccatcagttgcagggcaagtcaggacattagtaagtacctgaactggtatcagcagaaaccagatggaactgttaaactcctgatctaccatacatcaagattacactcaggagtcccatcaaggttcagtggcagtgggtctggaacagattattctctcaccattagcaacctggagcaagaagatattgccacttacttttgccaacagggtaatacgcttccgtacacgttcggaggggggaccaagctggagatcacactcgagggacagcctaaggccaatcctaccgtgacactgttccctccaagcagcgaagaactccaggccaacaaggccacacttgtgtgcctgatctccgacttctaccctggggctgtgacagtggcttggaaggccgatggatctcctgtgaaagccggcgtggaaaccaccaagccatccaagcagagcaacaacaaatacgccgccagctcctacctgagcctgacacctgagcagtggaagtcccacagatcctacagctgccaagtgacccacgaaggcagcaccgtggaaaagacagtggcccctacagagtgcagcggcagagccgattgcggcatcaccagcgccagctaccaccagggcgtgctgagcgccaccatcctgtacgagatcctgctgggcaaggccaccctgtacgccgtgctggtgtctgccctggtgctgatggctatggtcaagcggaaggacagccggggaagggccaagcgatctggatctggagcaacaaacttctcactactcaaacaagcaggtgacgtggaggagaatcccgggcctactagtatggactggatttggcgcatccttttccttgtcggcgctgctaccggcgcgcattccttcgaagtgaaactgcaggagtcaggacctggcctggtggcgccctcacagagcctgtccgtcacatgcactgtctcaggggtctcattacccgactatggtgtaagctggattcgccagcctccacgaaagggtctggagtggctgggagtaatatggggtagtgaaaccacatactataattcagctctcaaatccagactgaccatcatcaaggacaactccaagagccaagttttcttaaaaatgaacagtctgcaaactgatgacacagccatttactactgtgccaaacattattactacggtggtagctatgctatggactactggggccaaggaacctcagtcaccgtctcctcaacgcgtgcctctacaaagggaccctccgtgtttcctctggctcccagcagcaagtctacaagcggaggaacagccgctctgggctgcctggtcaaggattactttcccgagcctgtgaccgtgtcctggaatagcggagcactgacaagcggcgtgcacacctttccagccgtgctgcaaagcagcggcctgtactctctgagcagcgtggtcacagtgcctagctctagcctgggcacccagacctacatctgcaatgtgaaccacaagcctagcaacaccaaggtggacaagagagtggaacccaagagctgtatccccgaggacacattcttcccaagcagcgacgtgccctgcgacgtgaagctggtggaaaagagcttcgagacagacaccaacctgaacttccagaacctgagcgtgatcggcttcagaatcctgctgctgaaagtggccggctttaacctgctgatgaccctgcggctgtggtccagccgcgccaagagaagcggatctggcgtgaagcagaccctgaatttcgacctgctgaagctggctggcgacgtggaatccaacccaggcccttctagaggccatatggaacaacggggacagaacgccccggccgcttcgggggcccggaaaaggcacggcccaggacccagggaggcgcggggagccaggcctgggccccgggtccccaagacccttgtgctcgttgtcgccgcggtcctgctgttggtctcagctgagtctgctctgatcacccaacaagacctagctccccagcagagagcggccccacaacaaaagaggtccagcccctcagagggattgtgtccacctggacaccatatctcagaagacggtagagattgcatctcctgcaaatatggacaggactatagcactcactggaatgacctccttttctgcttgcgctgcaccaggtgtgattcaggtgaagtggagctaagtccctgcaccacgaccagaaacacagtgtgtcagtgcgaagaaggcaccttccgggaagaagattctcctgagatgtgccggaagtgccgcacagggtgtcccagagggatggtcaaggtcggtgattgtacaccctggagtgacatcgaatgtgtccacaaagaatcaggtacaaagcacagtggggaagtcccagctgtggaggagacggtgacctccagcccagggactcctgcctctccctgttctgggggcagtggctcttgtgacaaaactcacacatgcccaccgtgcccagcacctgaactcctggggggaccgtcagtcttcctcttccccccaaaacccaaggacaccctcatgatctcccggacccctgaggtcacatgcgtggtggtggacgtgagccacgaagaccctgaggtcaagttcaactggtacgtggacggcgtggaggtgcataatgccaagacaaagccgcgggaggagcagtacaacagcacgtaccgggtggtcagcgtcctcaccgtcctgcaccaggactggctgaatggcaaggagtacaagtgcaaggtctccaacaaagccctcccagcccccatcgagaaaaccatctccaaagccaaagggcagccccgagaaccacaggtgtacaccctgcccccatcccgggatgagctgaccaagaaccaggtcagcctgacctgcctggtcaaaggcttctatcccagcgacatcgccgtggagtgggagagcaatgggcagccggagaacaactacaagaccacgcctcccgtgctggactccgacggctccttcttcctctacagcaagctcaccgtggacaagagcaggtggcagcaggggaacgtcttctcatgctccgtgatgcatgaggctctgcacaaccactacacgcagaagagcctctccctgtctccgggtaaatga

SEQ ID NO: 2861 - DNA, 3369 bp, Artificial Sequence
  Synthetic Polynucleotide
atggccttaccagtgaccgccttgctcctgccgctggccttgctgctccacgccgccaggccggacatccagatgacacagactacatcctccctgtctgcctctctgggagacagagtcaccatcagttgcagggcaagtcaggacattagtaagtacctgaactggtatcagcagaaaccagatggaactgttaaactcctgatctaccatacatcaagattacactcaggagtcccatcaaggttcagtggcagtgggtctggaacagattattctctcaccattagcaacctggagcaagaagatattgccacttacttttgccaacagggtaatacgcttccgtacacgttcggaggggggaccaagctggagatcacactcgagggacagcctaaggccaatcctaccgtgacactgttccctccaagcagcgaagaactccaggccaacaaggccacacttgtgtgcctgatctccgacttctaccctggggctgtgacagtggcttggaaggccgatggatctcctgtgaaagccggcgtggaaaccaccaagccatccaagcagagcaacaacaaatacgccgccagctcctacctgagcctgacacctgagcagtggaagtcccacagatcctacagctgccaagtgacccacgaaggcagcaccgtggaaaagacagtggcccctacagagtgcagccccatcaagaccgatgtgattacaatggaccccaaggacaactgctccaaggacgccaacgataccctgctgctccagctgaccaacaccagcgcctactacatgtacttgttgctgctgctgaagtccgtggtgtacttcgccatcatcacatgctgcctgctgcggagaaccgccttctgctgcaacggcgagaagtctagggccaagcgatctggatctggagcaacaaacttctcactactcaaacaagcaggtgacgtggaggagaatcccgggcctactagtatggactggatttggcgcatccttttccttgtcggcgctgctaccggcgcgcattccttcgaagtgaaactgcaggagtcaggacctggcctggtggcgccctcacagagcctgtccgtcacatgcactgtctcaggggtctcattacccgactatggtgtaagctggattcgccagcctccacgaaagggtctggagtggctgggagtaatatggggtagtgaaaccacatactataattcagctctcaaatccagactgaccatcatcaaggacaactccaagagccaagttttcttaaaaatgaacagtctgcaaactgatgacacagccatttactactgtgccaaacattattactacggtggtagctatgctatggactactggggccaaggaacctcagtcaccgtctcctcaacgcgtgcctctacaaagggaccctccgtgtttcctctggctcccagcagcaagtctacaagcggaggaacagccgctctgggctgcctggtcaaggattactttcccgagcctgtgaccgtgtcctggaatagcggagcactgacaagcggcgtgcacacctttccagccgtgctgcaaagcagcggcctgtactctctgagcagcgtggtcacagtgcctagctctagcctgggcacccagacctacatctgcaatgtgaaccacaagcctagcaacaccaaggtggacaagagagtggaacccaagagctgtgaagtgaaaaccgactccaccgaccacgtgaagcccaaagagacagagaacaccaagcagcccagcaagagctgccacaagcccaaggccatcgtgcacaccgagaaagtgaacatgatgagcctgaccgtgctgggcctgcggatgctgttcgccaaaaccgtggccgtgaacttcctgctgaccgccaagctgttcttcctccgcgccaagagaagcggatctggcgtgaagcagaccctgaatttcgacctgctgaagctggctggcgacgtggaatccaacccaggcccttctagaggccatatggaacaacggggacagaacgccccggccgcttcgggggcccggaaaaggcacggcccaggacccagggaggcgcggggagccaggcctgggccccgggtccccaagacccttgtgctcgttgtcgccgcggtcctgctgttggtctcagctgagtctgctctgatcacccaacaagacctagctccccagcagagagcggccccacaacaaaagaggtccagcccctcagagggattgtgtccacctggacaccatatctcagaagacggtagagattgcatctcctgcaaatatggacaggactatagcactcactggaatgacctccttttctgcttgcgctgcaccaggtgtgattcaggtgaagtggagctaagtccctgcaccacgaccagaaacacagtgtgtcagtgcgaagaaggcaccttccgggaagaagattctcctgagatgtgccggaagtgccgcacagggtgtcccagagggatggtcaaggtcggtgattgtacaccctggagtgacatcgaatgtgtccacaaagaatcaggtacaaagcacagtggggaagtcccagctgtggaggagacggtgacctccagcccagggactcctgcctctccctgttctgggggcagtggctcttgtgacaaaactcacacatgcccaccgtgcccagcacctgaactcctggggggaccgtcagtcttcctcttccccccaaaacccaaggacaccctcatgatctcccggacccctgaggtcacatgcgtggtggtggacgtgagccacgaagaccctgaggtcaagttcaactggtacgtggacggcgtggaggtgcataatgccaagacaaagccgcgggaggagcagtacaacagcacgtaccgggtggtcagcgtcctcaccgtcctgcaccaggactggctgaatggcaaggagtacaagtgcaaggtctccaacaaagccctcccagcccccatcgagaaaaccatctccaaagccaaagggcagccccgagaaccacaggtgtacaccctgcccccatcccgggatgagctgaccaagaaccaggtcagcctgacctgcctggtcaaaggcttctatcccagcgacatcgccgtggagtgggagagcaatgggcagccggagaacaactacaagaccacgcctcccgtgctggactccgacggctccttcttcctctacagcaagctcaccgtggacaagagcaggtggcagcaggggaacgtcttctcatgctccgtgatgcatgaggctctgcacaaccactacacgcagaagagcctctccctgtctccgggtaaatga

SEQ ID NO: 2862 - DNA, 3270 bp, Artificial Sequence
  Synthetic Polynucleotide
atggccttaccagtgaccgccttgctcctgccgctggccttgctgctccacgccgccaggccgaatgctggcgtgacccagacacctaagttccaggtgctgaaaaccggccagagcatgaccctgcaatgcgcccaggacatgaaccatgagtacatgagctggtacagacaggaccccggcatgggcctgagactgatccactactctgtggctatccagaccaccgaccagggcgaagtgcccaatggctacaacgtgtccagaagcaccatcgaggacttcccactgagactgctgtctgccgctcctagccagaccagcgtgtacttttgtgccagcagctacctgggcaacaccggcgagctgttttttggcgagggcagcagactgaccgtggaggacctgaagaacgtgttcccacctgaggtggccgtgttcgagcctagcaaggccgagatcgcccacacccagaaagccaccctcgtgtgcctggctaccggcttctaccccgaccatgtggaactgtcttggtgggtcaacggcaaagaggtgcacagcggcgtgtgtaccgacccccagccactgaaagaacagcccgccctgaacgacagccggtactgcctgagcagcagactgagagtgtccgccaccttctggcagaacccccggaaccacttcagatgccaggtgcagttctacggcctgagcgagaacgacgagtggacccaggacagagccaagcccgtgacccagatcgtgtctgccgaagcctggggcagagccgattgcggcatcaccagcgccagctaccaccagggcgtgctgagcgccaccatcctgtacgagatcctgctgggcaaggccaccctgtacgccgtgctggtgtctgccctggtgctgatggctatggtcaagcggaaggacagccggggaagggccaagcgatctggatctggagcaacaaacttctcactactcaaacaagcaggtgacgtggaggagaatcccgggcctactagtatggactggatttggcgcatccttttccttgtcggcgctgctaccggcgcgcattccaatgctggcgtgacccagacacctaagttccaggtgctgaaaaccggccagagcatgaccctgcaatgcgcccaggacatgaaccatgagtacatgagctggtacagacaggaccccggcatgggcctgagactgatccactactctgtggctatccagaccaccgaccagggcgaagtgcccaatggctacaacgtgtccagaagcaccatcgaggacttcccactgagactgctgtctgccgctcctagccagaccagcgtgtacttttgtgccagcagctacctgggcaacaccggcgagctgttttttggcgagggcagcagactgaccgtgatccagaaccctgatcctgccgtgtaccagctgcgggatagcaagagcagcgacaagagcgtgtgtctgttcaccgacttcgacagccagaccaacgtgtcccagagcaaggactccgacgtgtacatcaccgataagtgcgtgctggacatgcggagcatggacttcaagagcaactccgccgtggcctggtccaacaagtccgatttcgcctgcgccaacgccttcaacaacagcattatccccgaggacacattcttcccaagcagcgacgtgccctgcgacgtgaagctggtggaaaagagcttcgagacagacaccaacctgaacttccagaacctgagcgtgatcggcttcagaatcctgctgctgaaagtggccggctttaacctgctgatgaccctgcggctgtggtccagccgcgccaagagaagcggatctggcgtgaagcagaccctgaatttcgacctgctgaagctggctggcgacgtggaatccaacccaggcccttctagaggccatatggaacaacggggacagaacgccccggccgcttcgggggcccggaaaaggcacggcccaggacccagggaggcgcggggagccaggcctgggccccgggtccccaagacccttgtgctcgttgtcgccgcggtcctgctgttggtctcagctgagtctgctctgatcacccaacaagacctagctccccagcagagagcggccccacaacaaaagaggtccagcccctcagagggattgtgtccacctggacaccatatctcagaagacggtagagattgcatctcctgcaaatatggacaggactatagcactcactggaatgacctccttttctgcttgcgctgcaccaggtgtgattcaggtgaagtggagctaagtccctgcaccacgaccagaaacacagtgtgtcagtgcgaagaaggcaccttccgggaagaagattctcctgagatgtgccggaagtgccgcacagggtgtcccagagggatggtcaaggtcggtgattgtacaccctggagtgacatcgaatgtgtccacaaagaatcaggtacaaagcacagtggggaagtcccagctgtggaggagacggtgacctccagcccagggactcctgcctctccctgttctgggggcagtggctcttgtgacaaaactcacacatgcccaccgtgcccagcacctgaactcctggggggaccgtcagtcttcctcttccccccaaaacccaaggacaccctcatgatctcccggacccctgaggtcacatgcgtggtggtggacgtgagccacgaagaccctgaggtcaagttcaactggtacgtggacggcgtggaggtgcataatgccaagacaaagccgcgggaggagcagtacaacagcacgtaccgggtggtcagcgtcctcaccgtcctgcaccaggactggctgaatggcaaggagtacaagtgcaaggtctccaacaaagccctcccagcccccatcgagaaaaccatctccaaagccaaagggcagccccgagaaccacaggtgtacaccctgcccccatcccgggatgagctgaccaagaaccaggtcagcctgacctgcctggtcaaaggcttctatcccagcgacatcgccgtggagtgggagagcaatgggcagccggagaacaactacaagaccacgcctcccgtgctggactccgacggctccttcttcctctacagcaagctcaccgtggacaagagcaggtggcagcaggggaacgtcttctcatgctccgtgatgcatgaggctctgcacaaccactacacgcagaagagcctctccctgtctccgggtaaatga

SEQ ID NO: 2863 - DNA, 3282 bp, Artificial Sequence
  Synthetic Polynucleotide
atgctcctgctgctcgtcccagtgctcgaggtgatttttaccctgggaggaaccagagcccagtcggtgacccagcttggcagccacgtctctgtctctgagggagccctggttctgctgaggtgcaactactcatcgtctgttccaccatatctcttctggtatgtgcaataccccaaccaaggactccagcttctcctgaagcacacaacaggggccaccctggttaaaggcatcaacggttttgaggctgaatttaagaagagtgaaacctccttccacctgacgaaaccctcagcccatatgagcgacgcggctgagtacttctgtgctgtgagtgattctagggctgcaggcaacaagctaacttttggaggaggaaccagggtgctagttaaaccaaatatccagaaccctgaccctgccgtgtaccagctgagagactctaaatccagtgacaagtctgtctgcctattcaccgattttgattctcaaacaaatgtgtcacaaagtaaggattctgatgtgtatatcacagacaaaactgtgctagacatgaggtctatggacttcaagagcaacagtgctgtggcctggagcaacaaatctgactttgcatgtgcaaacgccttcaacaacagcattattccagaagacaccttcttccccagcccagaaagttcctgtgatgtcaagctggtcgagaaaagctttgaaacagatacgaacctaaactttcaaaacctgtcagtgattgggttccgaatcctcctcctgaaagtggccgggtttaatctgctcatgacgctgcggctgtggtccagcagggccaagcgatctggatctggagcaacaaacttctcactactcaaacaagcaggtgacgtggaggagaatcccgggcctactagtatgggaatcaggctcctctgtcgtgtggccttttgtttcctggctgtaggcctcgtagatgtgaaagtaacccagagctcgagatatctagtcaaaaggacgggagagaaagtttttctggaatgtgtccaggatatggaccatgaaaatatgttctggtatcgacaagacccaggtctggggctacggctgatctatttctcatatgatgttaaaatgaaagaaaaaggagatattcctgaggggtacagtgtctctagagagaagaaggagcgcttctccctgattctggagtccgccagcaccaaccagacatctatgtacctctgtgccagcagattccccgggacagcctataattcacccctccactttgggaatgggaccaggctcactgtgacagaggacctgaacaaggtgttcccacccgaggtcgctgtgtttgagccatcagaagcagagatctcccacacccaaaaggccacactggtgtgcctggccacaggcttcttccctgaccacgtggagctgagctggtgggtgaatgggaaggaggtgcacagtggggtcagcacggacccgcagcccctcaaggagcagcccgccctcaatgactccagatactgcctgagcagccgcctgagggtctcggccaccttctggcagaacccccgcaaccacttccgctgtcaagtccagttctacgggctctcggagaatgacgagtggacccaggatagggccaaacccgtcacccagatcgtcagcgccgaggcctggggtagagcagactgtggctttacctcggtgtcctaccagcaaggggtcctgtctgccaccatcctctatgagatcctgctagggaaggccaccctgtatgctgtgctggtcagcgcccttgtgttgatggccatggtcaagagaaaggatttctgacgcgccaagagaagcggatctggcgtgaagcagaccctgaatttcgacctgctgaagctggctggcgacgtggaatccaacccaggcccttctagaggccatatggaacaacggggacagaacgccccggccgcttcgggggcccggaaaaggcacggcccaggacccagggaggcgcggggagccaggcctgggccccgggtccccaagacccttgtgctcgttgtcgccgcggtcctgctgttggtctcagctgagtctgctctgatcacccaacaagacctagctccccagcagagagcggccccacaacaaaagaggtccagcccctcagagggattgtgtccacctggacaccatatctcagaagacggtagagattgcatctcctgcaaatatggacaggactatagcactcactggaatgacctccttttctgcttgcgctgcaccaggtgtgattcaggtgaagtggagctaagtccctgcaccacgaccagaaacacagtgtgtcagtgcgaagaaggcaccttccgggaagaagattctcctgagatgtgccggaagtgccgcacagggtgtcccagagggatggtcaaggtcggtgattgtacaccctggagtgacatcgaatgtgtccacaaagaatcaggtacaaagcacagtggggaagtcccagctgtggaggagacggtgacctccagcccagggactcctgcctctccctgttctgggggcagtggctcttgtgacaaaactcacacatgcccaccgtgcccagcacctgaactcctggggggaccgtcagtcttcctcttccccccaaaacccaaggacaccctcatgatctcccggacccctgaggtcacatgcgtggtggtggacgtgagccacgaagaccctgaggtcaagttcaactggtacgtggacggcgtggaggtgcataatgccaagacaaagccgcgggaggagcagtacaacagcacgtaccgggtggtcagcgtcctcaccgtcctgcaccaggactggctgaatggcaaggagtacaagtgcaaggtctccaacaaagccctcccagcccccatcgagaaaaccatctccaaagccaaagggcagccccgagaaccacaggtgtacaccctgcccccatcccgggatgagctgaccaagaaccaggtcagcctgacctgcctggtcaaaggcttctatcccagcgacatcgccgtggagtgggagagcaatgggcagccggagaacaactacaagaccacgcctcccgtgctggactccgacggctccttcttcctctacagcaagctcaccgtggacaagagcaggtggcagcaggggaacgtcttctcatgctccgtgatgcatgaggctctgcacaaccactacacgcagaagagcctctccctgtctccgggtaaatga

SEQ ID NO: 2864 - DNA, 23 bp, Artificial Sequence
  Synthetic Polynucleotide
  misc_feature (1)..(23): n is a, c, g, or t
nnnnnnnnnnnnnnnnnnnnnnn

SEQ ID NO: 2865 - DNA, 2415 bp, Artificial Sequence
  Synthetic Polynucleotide
atggccttaccagtgaccgccttgctcctgccgctggccttgctgctccacgccgccaggccggacatccagatgacacagactacatcctccctgtctgcctctctgggagacagagtcaccatcagttgcagggcaagtcaggacattagtaaatatttaaattggtatcagcagaaaccagatggaactgttaaactcctgatctaccatacatcaagattacactcaggagtcccatcaaggttcagtggcagtgggtctggaacagattattctctcaccattagcaacctggagcaagaagatattgccacttacttttgccaacagggtaatacgcttccgtacacgttcggaggggggaccaagctggagatcacaggtggcggtggctcgggcggtggtgggtcgggtggcggcggatctgaggtgaaactgcaggagtcaggacctggcctggtggcgccctcacagagcctgtccgtcacatgcactgtctcaggggtctcattacccgactatggtgtaagctggattcgccagcctccacgaaagggtctggagtggctgggagtaatatggggtagtgaaaccacatactataattcagctctcaaatccagactgaccatcatcaaggacaactccaagagccaagttttcttaaaaatgaacagtctgcaaactgatgacacagccatttactactgtgccaaacattattactacggtggtagctatgctatggactactggggtcaaggaacctcagtcaccgtctcctcacgcgtagagcagaaactgatctcggaagaggatctggcgaagcccaccacgacgccagcgccgcgaccaccaacaccggcgcccaccatcgcgtcgcagcccctgtccctgcgcccagaggcgtgccggccagcggcggggggcgcagtgcacacgagggggctggacttcgcctgtgacatctacatctgggcgcccttggccgggacttgtggggtccttctcctgtcactggttatcaccctttactgcaaacggggcagaaagaaactcctgtatatattcaaacaaccatttatgagaccagtacaaactactcaagaggaagatggctgtagctgccgatttccagaagaagaagaaggaggatgtgaactgagagtgaagttcagcaggagcgcagacgcccccgcgtaccagcagggccagaaccagctctataacgagctgaatctaggacgaagagaggagtacgatgttttggacaagagacgtggccgggaccctgagatggggggaaagccgagaaggaagaaccctcaggaaggcctgtacaatgaactgcagaaagataagatggcggaggcctacagtgagattgggatgaaaggcgagcgccggaggggcaaggggcacgatggcctttaccagggtctcagtacagccaccaaggacacctacgacgcccttcacatgcaggccctgccccctcgctctagtggctccggcgagggcagaggaagtctactaacctgcggagatgtggaagaaaatcctggcccacatatggaacaacggggacagaacgccccggccgcttcgggggcccggaaaaggcacggcccaggacccagggaggcgcggggagccaggcctgggccccgggtccccaagacccttgtgctcgttgtcgccgcggtcctgctgttggtctcagctgagtctgctctgatcacccaacaagacctagctccccagcagagagcggccccacaacaaaagaggtccagcccctcagagggattgtgtccacctggacaccatatctcagaagacggtagagattgcatctcctgcaaatatggacaggactatagcactcactggaatgacctccttttctgcttgcgctgcaccaggtgtgattcaggtgaagtggagctaagtccctgcaccacgaccagaaacacagtgtgtcagtgcgaagaaggcaccttccgggaagaagattctcctgagatgtgccggaagtgccgcacagggtgtcccagagggatggtcaaggtcggtgattgtacaccctggagtgacatcgaatgtgtccacaaagaatcaggtacaaagcacagtggggaagtcccagctgtggaggagacggtgacctccagcccagggactcctgcctctccctgttctctctcaggcatcatcataggagtcacagttgcagccgtagtcttgattgtggctgtgtttgttcaacgaaggaaatatagatcaaacaaaggagaaagtcctgtggagcctgcagagccttgtcgttacagctgccccagggaggaggagggcagcaccatccccatccaggaggattaccgaaaaccggagcctgcctgctccccctga

SEQ ID NO: 2866 - DNA, 2889 bp, Artificial Sequence
  Synthetic Polynucleotide
atggccttaccagtgaccgccttgctcctgccgctggccttgctgctccacgccgccaggccggacatccagatgacacagactacatcctccctgtctgcctctctgggagacagagtcaccatcagttgcagggcaagtcaggacattagtaagtacctgaactggtatcagcagaaaccagatggaactgttaaactcctgatctaccatacatcaagattacactcaggagtcccatcaaggttcagtggcagtgggtctggaacagattattctctcaccattagcaacctggagcaagaagatattgccacttacttttgccaacagggtaatacgcttccgtacacgttcggaggggggaccaagctggagatcacactcgaggggaaaccaattcccaaccctcttctgggactggattcaaccggcagcggcgaggacctgaagaacgtgttcccacctgaggtggccgtgttcgagcctagcaaggccgagatcgcccacacccagaaagccaccctcgtgtgcctggctaccggcttctaccccgaccatgtggaactgtcttggtgggtcaacggcaaagaggtgcacagcggcgtgtgtaccgacccccagccactgaaagaacagcccgccctgaacgacagccggtactgcctgagcagcagactgagagtgtccgccaccttctggcagaacccccggaaccacttcagatgccaggtgcagttctacggcctgagcgagaacgacgagtggacccaggacagagccaagcccgtgacccagatcgtgtctgccgaagcctggggcagagccgattgcggcatcaccagcgccagctaccaccagggcgtgctgagcgccaccatcctgtacgagatcctgctgggcaaggccaccctgtacgccgtgctggtgtctgccctggtgctgatggctatggtcaagcggaaggacagccggggaagggccaagcgatctggatctggagcaacaaacttctcactactcaaacaagcaggtgacgtggaggagaatcccgggcctactagtatggactggatttggcgcatccttttccttgtcggcgctgctaccggcgcgcattccttcgaagtgaaactgcaggagtcaggacctggcctggtggcgccctcacagagcctgtccgtcacatgcactgtctcaggggtctcattacccgactatggtgtaagctggattcgccagcctccacgaaagggtctggagtggctgggagtaatatggggtagtgaaaccacatactataattcagctctcaaatccagactgaccatcatcaaggacaactccaagagccaagttttcttaaaaatgaacagtctgcaaactgatgacacagccatttactactgtgccaaacattattactacggtggtagctatgctatggactactggggccaaggaacctcagtcaccgtctcctcaacgcgtgagcagaaactgatctcggaagaggatgggagcggcatccagaaccctgatcctgccgtgtaccagctgcgggatagcaagagcagcgacaagagcgtgtgtctgttcaccgacttcgacagccagaccaacgtgtcccagagcaaggactccgacgtgtacatcaccgataagtgcgtgctggacatgcggagcatggacttcaagagcaactccgccgtggcctggtccaacaagtccgatttcgcctgcgccaacgccttcaacaacagcattatccccgaggacacattcttcccaagcagcgacgtgccctgcgacgtgaagctggtggaaaagagcttcgagacagacaccaacctgaacttccagaacctgagcgtgatcggcttcagaatcctgctgctgaaagtggccggctttaacctgctgatgaccctgcggctgtggtccagccgcgccaagagaagcggatctggcgtgaagcagaccctgaatttcgacctgctgaagctggctggcgacgtggaatccaacccaggcccttctagaggccatatggaacaacggggacagaacgccccggccgcttcgggggcccggaaaaggcacggcccaggacccagggaggcgcggggagccaggcctgggccccgggtccccaagacccttgtgctcgttgtcgccgcggtcctgctgttggtctcagctgagtctgctctgatcacccaacaagacctagctccccagcagagagcggccccacaacaaaagaggtccagcccctcagagggattgtgtccacctggacaccatatctcagaagacggtagagattgcatctcctgcaaatatggacaggactatagcactcactggaatgacctccttttctgcttgcgctgcaccaggtgtgattcaggtgaagtggagctaagtccctgcaccacgaccagaaacacagtgtgtcagtgcgaagaaggcaccttccgggaagaagattctcctgagatgtgccggaagtgccgcacagggtgtcccagagggatggtcaaggtcggtgattgtacaccctggagtgacatcgaatgtgtccacaaagaatcaggtacaaagcacagtggggaagtcccagctgtggaggagacggtgacctccagcccagggactcctgcctctccctgttctctctcaggcatcatcataggagtcacagttgcagccgtagtcttgattgtggctgtgtttgttcaacgaaggaaatatagatcaaacaaaggagaaagtcctgtggagcctgcagagccttgtcgttacagctgccccagggaggaggagggcagcaccatccccatccaggaggattaccgaaaaccggagcctgcctgctccccctga

SEQ ID NO: 2867 - DNA, 2307 bp, Artificial Sequence
  Synthetic Polynucleotide
atggccttaccagtgaccgccttgctcctgccgctggccttgctgctccacgccgccaggccggacatccagatgacacagactacatcctccctgtctgcctctctgggagacagagtcaccatcagttgcagggcaagtcaggacattagtaaatatttaaattggtatcagcagaaaccagatggaactgttaaactcctgatctaccatacatcaagattacactcaggagtcccatcaaggttcagtggcagtgggtctggaacagattattctctcaccattagcaacctggagcaagaagatattgccacttacttttgccaacagggtaatacgcttccgtacacgttcggaggggggaccaagctggagatcacaggtggcggtggctcgggcggtggtgggtcgggtggcggcggatctgaggtgaaactgcaggagtcaggacctggcctggtggcgccctcacagagcctgtccgtcacatgcactgtctcaggggtctcattacccgactatggtgtaagctggattcgccagcctccacgaaagggtctggagtggctgggagtaatatggggtagtgaaaccacatactataattcagctctcaaatccagactgaccatcatcaaggacaactccaagagccaagttttcttaaaaatgaacagtctgcaaactgatgacacagccatttactactgtgccaaacattattactacggtggtagctatgctatggactactggggtcaaggaacctcagtcaccgtctcctcacgcgtagagcagaaactgatctcggaagaggatctggcgaagcccaccacgacgccagcgccgcgaccaccaacaccggcgcccaccatcgcgtcgcagcccctgtccctgcgcccagaggcgtgccggccagcggcggggggcgcagtgcacacgagggggctggacttcgcctgtgacatctacatctgggcgcccttggccgggacttgtggggtccttctcctgtcactggttatcaccctttactgcgggcgcgccagagtgaagttcagcaggagcgcagacgcccccgcgtaccagcagggccagaaccagctctataacgagctgaatctaggacgaagagaggagtacgatgttttggacaagagacgtggccgggaccctgagatggggggaaagccgagaaggaagaaccctcaggaaggcctgtacaatgaactgcagaaagataagatggcggaggcctacagtgagattgggatgaaaggcgagcgccggaggggcaaggggcacgatggcctttaccagggtctcagtacagccaccaaggacacctacgacgcccttcacatgcaggccctgccccctcgctctagaggatctggagcaacaaacttctcactactcaaacaagcaggtgacgtggaggagaatcccgggcctgggatccacatggaacaacggggacagaacgccccggccgcttcgggggcccggaaaaggcacggcccaggacccagggaggcgcggggagccaggcctgggccccgggtccccaagacccttgtgctcgttgtcgccgcggtcctgctgttggtctcagctgagtctgctctgatcacccaacaagacctagctccccagcagagagcggccccacaacaaaagaggtccagcccctcagagggattgtgtccacctggacaccatatctcagaagacggtagagattgcatctcctgcaaatatggacaggactatagcactcactggaatgacctccttttctgcttgcgctgcaccaggtgtgattcaggtgaagtggagctaagtccctgcaccacgaccagaaacacagtgtgtcagtgcgaagaaggcaccttccgggaagaagattctcctgagatgtgccggaagtgccgcacagggtgtcccagagggatggtcaaggtcggtgattgtacaccctggagtgacatcgaatgtgtccacaaagaatcaggtacaaagcacagtggggaagtcccagctgtggaggagacggtgacctccagcccagggactcctgcctctccctgttctctctcaggcatcatcataggagtcacagttgcagccgtagtcttgattgtggctgtgtttgttcaacgaaggaaatatagatcaaacaaaggagaaagtcctgtggagcctgcagagccttgtcgttacagctgccccagggaggaggagggcagcaccatccccatccaggaggattaccgaaaaccggagcctgcctgctccccctga

SEQ ID NO: 2868 - DNA, 2271 bp, Artificial Sequence
  Synthetic Polynucleotide
atggccttaccagtgaccgccttgctcctgccgctggccttgctgctccacgccgccaggccggacatccagatgacacagactacatcctccctgtctgcctctctgggagacagagtcaccatcagttgcagggcaagtcaggacattagtaaatatttaaattggtatcagcagaaaccagatggaactgttaaactcctgatctaccatacatcaagattacactcaggagtcccatcaaggttcagtggcagtgggtctggaacagattattctctcaccattagcaacctggagcaagaagatattgccacttacttttgccaacagggtaatacgcttccgtacacgttcggaggggggaccaagctggagatcacaggtggcggtggctcgggcggtggtgggtcgggtggcggcggatctgaggtgaaactgcaggagtcaggacctggcctggtggcgccctcacagagcctgtccgtcacatgcactgtctcaggggtctcattacccgactatggtgtaagctggattcgccagcctccacgaaagggtctggagtggctgggagtaatatggggtagtgaaaccacatactataattcagctctcaaatccagactgaccatcatcaaggacaactccaagagccaagttttcttaaaaatgaacagtctgcaaactgatgacacagccatttactactgtgccaaacattattactacggtggtagctatgctatggactactggggtcaaggaacctcagtcaccgtctcctcacgcgtagacggtaacgaggagatgggaggaatcactcaaaccccttacaaagtctcaatttcaggaacaactgttatccttacatgtccccagtatcctggcagcgagatcctttggcagcataacgacaagaatatagggggagatgaagacgataagaatatcggatctgacgaggatcacttgagcctgaaagagttctccgagcttgaacaaagcggatattatgtgtgctatccgcgcgggtcaaagccggaagacgctaacttttacctttatctccgagccagagtgtgcgaaaattgcatggaaatggacgttatgtccgttgctacaatagttatcgtagatatatgcatcacgggtggactgcttctgctggtttattattggtccaagaatagaaaggccaaagctaaacccgtgaccagaggcgctggcgcaggcggaaggcaaaggggacaaaacaaagaacggccaccaccagtgccaaatccagattatgagcctattcggaaaggacagagggacctgtactctggcctgaatcagagaagaatctctagaggatctggagcaacaaacttctcactactcaaacaagcaggtgacgtggaggagaatcccgggcctgggatccacatggaacaacggggacagaacgccccggccgcttcgggggcccggaaaaggcacggcccaggacccagggaggcgcggggagccaggcctgggccccgggtccccaagacccttgtgctcgttgtcgccgcggtcctgctgttggtctcagctgagtctgctctgatcacccaacaagacctagctccccagcagagagcggccccacaacaaaagaggtccagcccctcagagggattgtgtccacctggacaccatatctcagaagacggtagagattgcatctcctgcaaatatggacaggactatagcactcactggaatgacctccttttctgcttgcgctgcaccaggtgtgattcaggtgaagtggagctaagtccctgcaccacgaccagaaacacagtgtgtcagtgcgaagaaggcaccttccgggaagaagattctcctgagatgtgccggaagtgccgcacagggtgtcccagagggatggtcaaggtcggtgattgtacaccctggagtgacatcgaatgtgtccacaaagaatcaggtacaaagcacagtggggaagtcccagctgtggaggagacggtgacctccagcccagggactcctgcctctccctgttctctctcaggcatcatcataggagtcacagttgcagccgtagtcttgattgtggctgtgtttgttcaacgaaggaaatatagatcaaacaaaggagaaagtcctgtggagcctgcagagccttgtcgttacagctgccccagggaggaggagggcagcaccatccccatccaggaggattaccgaaaaccggagcctgcctgctccccctga

SEQ ID NO: 2869 - DNA, 2166 bp, Artificial Sequence
  Synthetic Polynucleotide
atggccttaccagtgaccgccttgctcctgccgctggccttgctgctccacgccgccaggccggacatccagatgacacagactacatcctccctgtctgcctctctgggagacagagtcaccatcagttgcagggcaagtcaggacattagtaaatatttaaattggtatcagcagaaaccagatggaactgttaaactcctgatctaccatacatcaagattacactcaggagtcccatcaaggttcagtggcagtgggtctggaacagattattctctcaccattagcaacctggagcaagaagatattgccacttacttttgccaacagggtaatacgcttccgtacacgttcggaggggggaccaagctggagatcacaggtggcggtggctcgggcggtggtgggtcgggtggcggcggatctgaggtgaaactgcaggagtcaggacctggcctggtggcgccctcacagagcctgtccgtcacatgcactgtctcaggggtctcattacccgactatggtgtaagctggattcgccagcctccacgaaagggtctggagtggctgggagtaatatggggtagtgaaaccacatactataattcagctctcaaatccagactgaccatcatcaaggacaactccaagagccaagttttcttaaaaatgaacagtctgcaaactgatgacacagccatttactactgtgccaaacattattactacggtggtagctatgctatggactactggggtcaaggaacctcagtcaccgtctcctcacgcgtattcaagatccccatcgaggaactggaagatcgggtgttcgtgaactgcaacacctctatcacctgggtggaaggcaccgtgggaacactgctgagcgacatcaccagactggacctcggcaagcggattctggaccctcggggcatctacagatgcaacggcaccgacatctacaaggacaaagaaagcaccgtgcaggtccactacagaatgtgccagtcctgcgtggaactggaccctgctacagtggccggcatcatcgtgaccgatgtgatcgctactctgctgctggctctgggagtgttctgcttcgccggacacgaaacaggcagactgtctggcgctgccgatacacaggccctgctgagaaacgaccaagtgtatcagcccctgcgcgacagagatgatgcccagtattctcacctcggcggcaactgggctagaaacaagtctagaggatctggagcaacaaacttctcactactcaaacaagcaggtgacgtggaggagaatcccgggcctgggatccacatggaacaacggggacagaacgccccggccgcttcgggggcccggaaaaggcacggcccaggacccagggaggcgcggggagccaggcctgggccccgggtccccaagacccttgtgctcgttgtcgccgcggtcctgctgttggtctcagctgagtctgctctgatcacccaacaagacctagctccccagcagagagcggccccacaacaaaagaggtccagcccctcagagggattgtgtccacctggacaccatatctcagaagacggtagagattgcatctcctgcaaatatggacaggactatagcactcactggaatgacctccttttctgcttgcgctgcaccaggtgtgattcaggtgaagtggagctaagtccctgcaccacgaccagaaacacagtgtgtcagtgcgaagaaggcaccttccgggaagaagattctcctgagatgtgccggaagtgccgcacagggtgtcccagagggatggtcaaggtcggtgattgtacaccctggagtgacatcgaatgtgtccacaaagaatcaggtacaaagcacagtggggaagtcccagctgtggaggagacggtgacctccagcccagggactcctgcctctccctgttctctctcaggcatcatcataggagtcacagttgcagccgtagtcttgattgtggctgtgtttgttcaacgaaggaaatatagatcaaacaaaggagaaagtcctgtggagcctgcagagccttgtcgttacagctgccccagggaggaggagggcagcaccatccccatccaggaggattaccgaaaaccggagcctgcctgctccccctga

SEQ ID NO: 2870 - DNA, 2196 bp, Artificial Sequence
  Synthetic Polynucleotide
atggccttaccagtgaccgccttgctcctgccgctggccttgctgctccacgccgccaggccggacatccagatgacacagactacatcctccctgtctgcctctctgggagacagagtcaccatcagttgcagggcaagtcaggacattagtaaatatttaaattggtatcagcagaaaccagatggaactgttaaactcctgatctaccatacatcaagattacactcaggagtcccatcaaggttcagtggcagtgggtctggaacagattattctctcaccattagcaacctggagcaagaagatattgccacttacttttgccaacagggtaatacgcttccgtacacgttcggaggggggaccaagctggagatcacaggtggcggtggctcgggcggtggtgggtcgggtggcggcggatctgaggtgaaactgcaggagtcaggacctggcctggtggcgccctcacagagcctgtccgtcacatgcactgtctcaggggtctcattacccgactatggtgtaagctggattcgccagcctccacgaaagggtctggagtggctgggagtaatatggggtagtgaaaccacatactataattcagctctcaaatccagactgaccatcatcaaggacaactccaagagccaagttttcttaaaaatgaacagtctgcaaactgatgacacagccatttactactgtgccaaacattattactacggtggtagctatgctatggactactggggtcaaggaacctcagtcaccgtctcctcacgcgtacagagcatcaagggcaaccacctggtcaaggtgtacgactaccaagaggacggcagcgtgctgctgacatgtgatgccgaggccaagaacatcacctggtttaaggacggcaagatgatcggcttcctgaccgaggacaagaagaagtggaacctgggcagcaacgctaaggaccccagaggcatgtatcagtgcaagggcagccagaacaagagcaagcccctccaggtgtactaccggatgtgccagaactgcatcgagctgaacgccgctaccatcagcggctttctgttcgccgagatcgtgtccatcttcgtgctggccgtgggcgtgtactttatcgctggacaggatggcgtgcggcagagcagagcttccgataagcaaaccctgctgcctaacgaccagctgtaccagcctctgaaggacagagaggacgaccagtacagccacctccagggcaatcagctgagaagaaactctagaggatctggagcaacaaacttctcactactcaaacaagcaggtgacgtggaggagaatcccgggcctgggatccacatggaacaacggggacagaacgccccggccgcttcgggggcccggaaaaggcacggcccaggacccagggaggcgcggggagccaggcctgggccccgggtccccaagacccttgtgctcgttgtcgccgcggtcctgctgttggtctcagctgagtctgctctgatcacccaacaagacctagctccccagcagagagcggccccacaacaaaagaggtccagcccctcagagggattgtgtccacctggacaccatatctcagaagacggtagagattgcatctcctgcaaatatggacaggactatagcactcactggaatgacctccttttctgcttgcgctgcaccaggtgtgattcaggtgaagtggagctaagtccctgcaccacgaccagaaacacagtgtgtcagtgcgaagaaggcaccttccgggaagaagattctcctgagatgtgccggaagtgccgcacagggtgtcccagagggatggtcaaggtcggtgattgtacaccctggagtgacatcgaatgtgtccacaaagaatcaggtacaaagcacagtggggaagtcccagctgtggaggagacggtgacctccagcccagggactcctgcctctccctgttctctctcaggcatcatcataggagtcacagttgcagccgtagtcttgattgtggctgtgtttgttcaacgaaggaaatatagatcaaacaaaggagaaagtcctgtggagcctgcagagccttgtcgttacagctgccccagggaggaggagggcagcaccatccccatccaggaggattaccgaaaaccggagcctgcctgctccccctga

SEQ ID NO: 2871 - DNA, 2145 bp, Artificial Sequence
  Synthetic Polynucleotide
atggccttaccagtgaccgccttgctcctgccgctggccttgctgctccacgccgccaggccggacatccagatgacacagactacatcctccctgtctgcctctctgggagacagagtcaccatcagttgcagggcaagtcaggacattagtaaatatttaaattggtatcagcagaaaccagatggaactgttaaactcctgatctaccatacatcaagattacactcaggagtcccatcaaggttcagtggcagtgggtctggaacagattattctctcaccattagcaacctggagcaagaagatattgccacttacttttgccaacagggtaatacgcttccgtacacgttcggaggggggaccaagctggagatcacaggtggcggtggctcgggcggtggtgggtcgggtggcggcggatctgaggtgaaactgcaggagtcaggacctggcctggtggcgccctcacagagcctgtccgtcacatgcactgtctcaggggtctcattacccgactatggtgtaagctggattcgccagcctccacgaaagggtctggagtggctgggagtaatatggggtagtgaaaccacatactataattcagctctcaaatccagactgaccatcatcaaggacaactccaagagccaagttttcttaaaaatgaacagtctgcaaactgatgacacagccatttactactgtgccaaacattattactacggtggtagctatgctatggactactggggtcaaggaacctcagtcaccgtctcctcacgcgtacagagttttgggttgttggaccctaaattgtgctatctgttggacggaatcctgttcatttacggagtgatcctgaccgcattgttcctgcgggttaagttttccagatccgcagacgcacccgcttaccaacaagggcagaaccaactctacaatgaacttaatttggggcggagggaagagtacgacgttctggacaaaaggaggggacgagatcccgagatgggcggaaagcctcagcgaaggaagaatccgcaagaggggctttataacgaactccagaaagataaaatggcagaagcctatagtgagattgggatgaagggagaaaggaggaggggtaaaggtcacgatgggttgtaccaaggattgagcacagccactaaagatacctatgatgcgctccacatgcaggccctgccgccaagatctagaggatctggagcaacaaacttctcactactcaaacaagcaggtgacgtggaggagaatcccgggcctgggatccacatggaacaacggggacagaacgccccggccgcttcgggggcccggaaaaggcacggcccaggacccagggaggcgcggggagccaggcctgggccccgggtccccaagacccttgtgctcgttgtcgccgcggtcctgctgttggtctcagctgagtctgctctgatcacccaacaagacctagctccccagcagagagcggccccacaacaaaagaggtccagcccctcagagggattgtgtccacctggacaccatatctcagaagacggtagagattgcatctcctgcaaatatggacaggactatagcactcactggaatgacctccttttctgcttgcgctgcaccaggtgtgattcaggtgaagtggagctaagtccctgcaccacgaccagaaacacagtgtgtcagtgcgaagaaggcaccttccgggaagaagattctcctgagatgtgccggaagtgccgcacagggtgtcccagagggatggtcaaggtcggtgattgtacaccctggagtgacatcgaatgtgtccacaaagaatcaggtacaaagcacagtggggaagtcccagctgtggaggagacggtgacctccagcccagggactcctgcctctccctgttctctctcaggcatcatcataggagtcacagttgcagccgtagtcttgattgtggctgtgtttgttcaacgaaggaaatatagatcaaacaaaggagaaagtcctgtggagcctgcagagccttgtcgttacagctgccccagggaggaggagggcagcaccatccccatccaggaggattaccgaaaaccggagcctgcctgctccccctga

SEQ ID NO: 2872 - DNA, 2811 bp, Artificial Sequence
  Synthetic Polynucleotide
atggccttaccagtgaccgccttgctcctgccgctggccttgctgctccacgccgccaggccggacatccagatgacacagactacatcctccctgtctgcctctctgggagacagagtcaccatcagttgcagggcaagtcaggacattagtaagtacctgaactggtatcagcagaaaccagatggaactgttaaactcctgatctaccatacatcaagattacactcaggagtcccatcaaggttcagtggcagtgggtctggaacagattattctctcaccattagcaacctggagcaagaagatattgccacttacttttgccaacagggtaatacgcttccgtacacgttcggaggggggaccaagctggagatcacactcgagggacagcctaaggccaatcctaccgtgacactgttccctccaagcagcgaagaactccaggccaacaaggccacacttgtgtgcctgatctccgacttctaccctggggctgtgacagtggcttggaaggccgatggatctcctgtgaaagccggcgtggaaaccaccaagccatccaagcagagcaacaacaaatacgccgccagctcctacctgagcctgacacctgagcagtggaagtcccacagatcctacagctgccaagtgacccacgaaggcagcaccgtggaaaagacagtggcccctacagagtgcagcggcagagccgattgcggcatcaccagcgccagctaccaccagggcgtgctgagcgccaccatcctgtacgagatcctgctgggcaaggccaccctgtacgccgtgctggtgtctgccctggtgctgatggctatggtcaagcggaaggacagccggggaagggccaagcgatctggatctggagcaacaaacttctcactactcaaacaagcaggtgacgtggaggagaatcccgggcctactagtatggactggatttggcgcatccttttccttgtcggcgctgctaccggcgcgcattccttcgaagtgaaactgcaggagtcaggacctggcctggtggcgccctcacagagcctgtccgtcacatgcactgtctcaggggtctcattacccgactatggtgtaagctggattcgccagcctccacgaaagggtctggagtggctgggagtaatatggggtagtgaaaccacatactataattcagctctcaaatccagactgaccatcatcaaggacaactccaagagccaagttttcttaaaaatgaacagtctgcaaactgatgacacagccatttactactgtgccaaacattattactacggtggtagctatgctatggactactggggccaaggaacctcagtcaccgtctcctcaacgcgtgcctctacaaagggaccctccgtgtttcctctggctcccagcagcaagtctacaagcggaggaacagccgctctgggctgcctggtcaaggattactttcccgagcctgtgaccgtgtcctggaatagcggagcactgacaagcggcgtgcacacctttccagccgtgctgcaaagcagcggcctgtactctctgagcagcgtggtcacagtgcctagctctagcctgggcacccagacctacatctgcaatgtgaaccacaagcctagcaacaccaaggtggacaagagagtggaacccaagagctgtatccccgaggacacattcttcccaagcagcgacgtgccctgcgacgtgaagctggtggaaaagagcttcgagacagacaccaacctgaacttccagaacctgagcgtgatcggcttcagaatcctgctgctgaaagtggccggctttaacctgctgatgaccctgcggctgtggtccagccgcgccaagagaagcggatctggcgtgaagcagaccctgaatttcgacctgctgaagctggctggcgacgtggaatccaacccaggcccttctagaggccatatggaacaacggggacagaacgccccggccgcttcgggggcccggaaaaggcacggcccaggacccagggaggcgcggggagccaggcctgggccccgggtccccaagacccttgtgctcgttgtcgccgcggtcctgctgttggtctcagctgagtctgctctgatcacccaacaagacctagctccccagcagagagcggccccacaacaaaagaggtccagcccctcagagggattgtgtccacctggacaccatatctcagaagacggtagagattgcatctcctgcaaatatggacaggactatagcactcactggaatgacctccttttctgcttgcgctgcaccaggtgtgattcaggtgaagtggagctaagtccctgcaccacgaccagaaacacagtgtgtcagtgcgaagaaggcaccttccgggaagaagattctcctgagatgtgccggaagtgccgcacagggtgtcccagagggatggtcaaggtcggtgattgtacaccctggagtgacatcgaatgtgtccacaaagaatcaggtacaaagcacagtggggaagtcccagctgtggaggagacggtgacctccagcccagggactcctgcctctccctgttctctctcaggcatcatcataggagtcacagttgcagccgtagtcttgattgtggctgtgtttgttcaacgaaggaaatatagatcaaacaaaggagaaagtcctgtggagcctgcagagccttgtcgttacagctgccccagggaggaggagggcagcaccatccccatccaggaggattaccgaaaaccggagcctgcctgctccccctga

SEQ ID NO: 2873 - DNA, 2877 bp, Artificial Sequence
  Synthetic Polynucleotide
atggccttaccagtgaccgccttgctcctgccgctggccttgctgctccacgccgccaggccggacatccagatgacacagactacatcctccctgtctgcctctctgggagacagagtcaccatcagttgcagggcaagtcaggacattagtaagtacctgaactggtatcagcagaaaccagatggaactgttaaactcctgatctaccatacatcaagattacactcaggagtcccatcaaggttcagtggcagtgggtctggaacagattattctctcaccattagcaacctggagcaagaagatattgccacttacttttgccaacagggtaatacgcttccgtacacgttcggaggggggaccaagctggagatcacactcgagggacagcctaaggccaatcctaccgtgacactgttccctccaagcagcgaagaactccaggccaacaaggccacacttgtgtgcctgatctccgacttctaccctggggctgtgacagtggcttggaaggccgatggatctcctgtgaaagccggcgtggaaaccaccaagccatccaagcagagcaacaacaaatacgccgccagctcctacctgagcctgacacctgagcagtggaagtcccacagatcctacagctgccaagtgacccacgaaggcagcaccgtggaaaagacagtggcccctacagagtgcagccccatcaagaccgatgtgattacaatggaccccaaggacaactgctccaaggacgccaacgataccctgctgctccagctgaccaacaccagcgcctactacatgtacttgttgctgctgctgaagtccgtggtgtacttcgccatcatcacatgctgcctgctgcggagaaccgccttctgctgcaacggcgagaagtctagggccaagcgatctggatctggagcaacaaacttctcactactcaaacaagcaggtgacgtggaggagaatcccgggcctactagtatggactggatttggcgcatccttttccttgtcggcgctgctaccggcgcgcattccttcgaagtgaaactgcaggagtcaggacctggcctggtggcgccctcacagagcctgtccgtcacatgcactgtctcaggggtctcattacccgactatggtgtaagctggattcgccagcctccacgaaagggtctggagtggctgggagtaatatggggtagtgaaaccacatactataattcagctctcaaatccagactgaccatcatcaaggacaactccaagagccaagttttcttaaaaatgaacagtctgcaaactgatgacacagccatttactactgtgccaaacattattactacggtggtagctatgctatggactactggggccaaggaacctcagtcaccgtctcctcaacgcgtgcctctacaaagggaccctccgtgtttcctctggctcccagcagcaagtctacaagcggaggaacagccgctctgggctgcctggtcaaggattactttcccgagcctgtgaccgtgtcctggaatagcggagcactgacaagcggcgtgcacacctttccagccgtgctgcaaagcagcggcctgtactctctgagcagcgtggtcacagtgcctagctctagcctgggcacccagacctacatctgcaatgtgaaccacaagcctagcaacaccaaggtggacaagagagtggaacccaagagctgtgaagtgaaaaccgactccaccgaccacgtgaagcccaaagagacagagaacaccaagcagcccagcaagagctgccacaagcccaaggccatcgtgcacaccgagaaagtgaacatgatgagcctgaccgtgctgggcctgcggatgctgttcgccaaaaccgtggccgtgaacttcctgctgaccgccaagctgttcttcctccgcgccaagagaagcggatctggcgtgaagcagaccctgaatttcgacctgctgaagctggctggcgacgtggaatccaacccaggcccttctagaggccatatggaacaacggggacagaacgccccggccgcttcgggggcccggaaaaggcacggcccaggacccagggaggcgcggggagccaggcctgggccccgggtccccaagacccttgtgctcgttgtcgccgcggtcctgctgttggtctcagctgagtctgctctgatcacccaacaagacctagctccccagcagagagcggccccacaacaaaagaggtccagcccctcagagggattgtgtccacctggacaccatatctcagaagacggtagagattgcatctcctgcaaatatggacaggactatagcactcactggaatgacctccttttctgcttgcgctgcaccaggtgtgattcaggtgaagtggagctaagtccctgcaccacgaccagaaacacagtgtgtcagtgcgaagaaggcaccttccgggaagaagattctcctgagatgtgccggaagtgccgcacagggtgtcccagagggatggtcaaggtcggtgattgtacaccctggagtgacatcgaatgtgtccacaaagaatcaggtacaaagcacagtggggaagtcccagctgtggaggagacggtgacctccagcccagggactcctgcctctccctgttctctctcaggcatcatcataggagtcacagttgcagccgtagtcttgattgtggctgtgtttgttcaacgaaggaaatatagatcaaacaaaggagaaagtcctgtggagcctgcagagccttgtcgttacagctgccccagggaggaggagggcagcaccatccccatccaggaggattaccgaaaaccggagcctgcctgctccccctga

SEQ ID NO: 2874 - DNA, 2778 bp, Artificial Sequence
  Synthetic Polynucleotide
atggccttaccagtgaccgccttgctcctgccgctggccttgctgctccacgccgccaggccgaatgctggcgtgacccagacacctaagttccaggtgctgaaaaccggccagagcatgaccctgcaatgcgcccaggacatgaaccatgagtacatgagctggtacagacaggaccccggcatgggcctgagactgatccactactctgtggctatccagaccaccgaccagggcgaagtgcccaatggctacaacgtgtccagaagcaccatcgaggacttcccactgagactgctgtctgccgctcctagccagaccagcgtgtacttttgtgccagcagctacctgggcaacaccggcgagctgttttttggcgagggcagcagactgaccgtggaggacctgaagaacgtgttcccacctgaggtggccgtgttcgagcctagcaaggccgagatcgcccacacccagaaagccaccctcgtgtgcctggctaccggcttctaccccgaccatgtggaactgtcttggtgggtcaacggcaaagaggtgcacagcggcgtgtgtaccgacccccagccactgaaagaacagcccgccctgaacgacagccggtactgcctgagcagcagactgagagtgtccgccaccttctggcagaacccccggaaccacttcagatgccaggtgcagttctacggcctgagcgagaacgacgagtggacccaggacagagccaagcccgtgacccagatcgtgtctgccgaagcctggggcagagccgattgcggcatcaccagcgccagctaccaccagggcgtgctgagcgccaccatcctgtacgagatcctgctgggcaaggccaccctgtacgccgtgctggtgtctgccctggtgctgatggctatggtcaagcggaaggacagccggggaagggccaagcgatctggatctggagcaacaaacttctcactactcaaacaagcaggtgacgtggaggagaatcccgggcctactagtatggactggatttggcgcatccttttccttgtcggcgctgctaccggcgcgcattccaatgctggcgtgacccagacacctaagttccaggtgctgaaaaccggccagagcatgaccctgcaatgcgcccaggacatgaaccatgagtacatgagctggtacagacaggaccccggcatgggcctgagactgatccactactctgtggctatccagaccaccgaccagggcgaagtgcccaatggctacaacgtgtccagaagcaccatcgaggacttcccactgagactgctgtctgccgctcctagccagaccagcgtgtacttttgtgccagcagctacctgggcaacaccggcgagctgttttttggcgagggcagcagactgaccgtgatccagaaccctgatcctgccgtgtaccagctgcgggatagcaagagcagcgacaagagcgtgtgtctgttcaccgacttcgacagccagaccaacgtgtcccagagcaaggactccgacgtgtacatcaccgataagtgcgtgctggacatgcggagcatggacttcaagagcaactccgccgtggcctggtccaacaagtccgatttcgcctgcgccaacgccttcaacaacagcattatccccgaggacacattcttcccaagcagcgacgtgccctgcgacgtgaagctggtggaaaagagcttcgagacagacaccaacctgaacttccagaacctgagcgtgatcggcttcagaatcctgctgctgaaagtggccggctttaacctgctgatgaccctgcggctgtggtccagccgcgccaagagaagcggatctggcgtgaagcagaccctgaatttcgacctgctgaagctggctggcgacgtggaatccaacccaggcccttctagaggccatatggaacaacggggacagaacgccccggccgcttcgggggcccggaaaaggcacggcccaggacccagggaggcgcggggagccaggcctgggccccgggtccccaagacccttgtgctcgttgtcgccgcggtcctgctgttggtctcagctgagtctgctctgatcacccaacaagacctagctccccagcagagagcggccccacaacaaaagaggtccagcccctcagagggattgtgtccacctggacaccatatctcagaagacggtagagattgcatctcctgcaaatatggacaggactatagcactcactggaatgacctccttttctgcttgcgctgcaccaggtgtgattcaggtgaagtggagctaagtccctgcaccacgaccagaaacacagtgtgtcagtgcgaagaaggcaccttccgggaagaagattctcctgagatgtgccggaagtgccgcacagggtgtcccagagggatggtcaaggtcggtgattgtacaccctggagtgacatcgaatgtgtccacaaagaatcaggtacaaagcacagtggggaagtcccagctgtggaggagacggtgacctccagcccagggactcctgcctctccctgttctctctcaggcatcatcataggagtcacagttgcagccgtagtcttgattgtggctgtgtttgttcaacgaaggaaatatagatcaaacaaaggagaaagtcctgtggagcctgcagagccttgtcgttacagctgccccagggaggaggagggcagcaccatccccatccaggaggattaccgaaaaccggagcctgcctgctccccctga

SEQ ID NO: 2875 - DNA, 2790 bp, Artificial Sequence
  Synthetic Polynucleotide
atgctcctgctgctcgtcccagtgctcgaggtgatttttaccctgggaggaaccagagcccagtcggtgacccagcttggcagccacgtctctgtctctgagggagccctggttctgctgaggtgcaactactcatcgtctgttccaccatatctcttctggtatgtgcaataccccaaccaaggactccagcttctcctgaagcacacaacaggggccaccctggttaaaggcatcaacggttttgaggctgaatttaagaagagtgaaacctccttccacctgacgaaaccctcagcccatatgagcgacgcggctgagtacttctgtgctgtgagtgattctagggctgcaggcaacaagctaacttttggaggaggaaccagggtgctagttaaaccaaatatccagaaccctgaccctgccgtgtaccagctgagagactctaaatccagtgacaagtctgtctgcctattcaccgattttgattctcaaacaaatgtgtcacaaagtaaggattctgatgtgtatatcacagacaaaactgtgctagacatgaggtctatggacttcaagagcaacagtgctgtggcctggagcaacaaatctgactttgcatgtgcaaacgccttcaacaacagcattattccagaagacaccttcttccccagcccagaaagttcctgtgatgtcaagctggtcgagaaaagctttgaaacagatacgaacctaaactttcaaaacctgtcagtgattgggttccgaatcctcctcctgaaagtggccgggtttaatctgctcatgacgctgcggctgtggtccagcagggccaagcgatctggatctggagcaacaaacttctcactactcaaacaagcaggtgacgtggaggagaatcccgggcctactagtatgggaatcaggctcctctgtcgtgtggccttttgtttcctggctgtaggcctcgtagatgtgaaagtaacccagagctcgagatatctagtcaaaaggacgggagagaaagtttttctggaatgtgtccaggatatggaccatgaaaatatgttctggtatcgacaagacccaggtctggggctacggctgatctatttctcatatgatgttaaaatgaaagaaaaaggagatattcctgaggggtacagtgtctctagagagaagaaggagcgcttctccctgattctggagtccgccagcaccaaccagacatctatgtacctctgtgccagcagattccccgggacagcctataattcacccctccactttgggaatgggaccaggctcactgtgacagaggacctgaacaaggtgttcccacccgaggtcgctgtgtttgagccatcagaagcagagatctcccacacccaaaaggccacactggtgtgcctggccacaggcttcttccctgaccacgtggagctgagctggtgggtgaatgggaaggaggtgcacagtggggtcagcacggacccgcagcccctcaaggagcagcccgccctcaatgactccagatactgcctgagcagccgcctgagggtctcggccaccttctggcagaacccccgcaaccacttccgctgtcaagtccagttctacgggctctcggagaatgacgagtggacccaggatagggccaaacccgtcacccagatcgtcagcgccgaggcctggggtagagcagactgtggctttacctcggtgtcctaccagcaaggggtcctgtctgccaccatcctctatgagatcctgctagggaaggccaccctgtatgctgtgctggtcagcgcccttgtgttgatggccatggtcaagagaaaggatttctgacgcgccaagagaagcggatctggcgtgaagcagaccctgaatttcgacctgctgaagctggctggcgacgtggaatccaacccaggcccttctagaggccatatggaacaacggggacagaacgccccggccgcttcgggggcccggaaaaggcacggcccaggacccagggaggcgcggggagccaggcctgggccccgggtccccaagacccttgtgctcgttgtcgccgcggtcctgctgttggtctcagctgagtctgctctgatcacccaacaagacctagctccccagcagagagcggccccacaacaaaagaggtccagcccctcagagggattgtgtccacctggacaccatatctcagaagacggtagagattgcatctcctgcaaatatggacaggactatagcactcactggaatgacctccttttctgcttgcgctgcaccaggtgtgattcaggtgaagtggagctaagtccctgcaccacgaccagaaacacagtgtgtcagtgcgaagaaggcaccttccgggaagaagattctcctgagatgtgccggaagtgccgcacagggtgtcccagagggatggtcaaggtcggtgattgtacaccctggagtgacatcgaatgtgtccacaaagaatcaggtacaaagcacagtggggaagtcccagctgtggaggagacggtgacctccagcccagggactcctgcctctccctgttctctctcaggcatcatcataggagtcacagttgcagccgtagtcttgattgtggctgtgtttgttcaacgaaggaaatatagatcaaacaaaggagaaagtcctgtggagcctgcagagccttgtcgttacagctgccccagggaggaggagggcagcaccatccccatccaggaggattaccgaaaaccggagcctgcctgctccccctga

SEQ ID NO: 2876 - DNA, 23 bp, Artificial Sequence
  Synthetic Polynucleotide
  misc_feature (1)..(23): n is a, c, g, or t
nnnnnnnnnnnnnnnnnnnnnnn

SEQ ID NO: 2877 - DNA, 2394 bp, Artificial Sequence
  Synthetic Polynucleotide
atggccttaccagtgaccgccttgctcctgccgctggccttgctgctccacgccgccaggccggacatccagatgacacagactacatcctccctgtctgcctctctgggagacagagtcaccatcagttgcagggcaagtcaggacattagtaaatatttaaattggtatcagcagaaaccagatggaactgttaaactcctgatctaccatacatcaagattacactcaggagtcccatcaaggttcagtggcagtgggtctggaacagattattctctcaccattagcaacctggagcaagaagatattgccacttacttttgccaacagggtaatacgcttccgtacacgttcggaggggggaccaagctggagatcacaggtggcggtggctcgggcggtggtgggtcgggtggcggcggatctgaggtgaaactgcaggagtcaggacctggcctggtggcgccctcacagagcctgtccgtcacatgcactgtctcaggggtctcattacccgactatggtgtaagctggattcgccagcctccacgaaagggtctggagtggctgggagtaatatggggtagtgaaaccacatactataattcagctctcaaatccagactgaccatcatcaaggacaactccaagagccaagttttcttaaaaatgaacagtctgcaaactgatgacacagccatttactactgtgccaaacattattactacggtggtagctatgctatggactactggggtcaaggaacctcagtcaccgtctcctcacgcgtagagcagaaactgatctcggaagaggatctggcgaagcccaccacgacgccagcgccgcgaccaccaacaccggcgcccaccatcgcgtcgcagcccctgtccctgcgcccagaggcgtgccggccagcggcggggggcgcagtgcacacgagggggctggacttcgcctgtgacatctacatctgggcgcccttggccgggacttgtggggtccttctcctgtcactggttatcaccctttactgcaaacggggcagaaagaaactcctgtatatattcaaacaaccatttatgagaccagtacaaactactcaagaggaagatggctgtagctgccgatttccagaagaagaagaaggaggatgtgaactgagagtgaagttcagcaggagcgcagacgcccccgcgtaccagcagggccagaaccagctctataacgagctgaatctaggacgaagagaggagtacgatgttttggacaagagacgtggccgggaccctgagatggggggaaagccgagaaggaagaaccctcaggaaggcctgtacaatgaactgcagaaagataagatggcggaggcctacagtgagattgggatgaaaggcgagcgccggaggggcaaggggcacgatggcctttaccagggtctcagtacagccaccaaggacacctacgacgcccttcacatgcaggccctgccccctcgctctagtggctccggcgagggcagaggaagtctactaacctgcggagatgtggaagaaaatcctggcccacatatggaacaacggggacagaacgccccggccgcttcgggggcccggaaaaggcacggcccaggacccagggaggcgcggggagccaggcctgggccccgggtccccaagacccttgtgctcgttgtcgccgcggtcctgctgttggtctcagctgagtctgctctgatcacccaacaagacctagctccccagcagagagcggccccacaacaaaagaggtccagcccctcagagggattgtgtccacctggacaccatatctcagaagacggtagagattgcatctcctgcaaatatggacaggactatagcactcactggaatgacctccttttctgcttgcgctgcaccaggtgtgattcaggtgaagtggagctaagtccctgcaccacgaccagaaacacagtgtgtcagtgcgaagaaggcaccttccgggaagaagattctcctgagatgtgccggaagtgccgcacagggtgtcccagagggatggtcaaggtcggtgattgtacaccctggagtgacatcgaatgtgtccacaaagaatcaggtacaaagcacagtggggaagtcccagctgtggaggagacggtgacctccagcccagggactcctgcctctccctgttctctctcaggcatcatcataggagtcacagttgcagccgtagtcttgattgtggctgtgtttgttaggagtaagaggagcaggctcctgcacagtgactacatgaacatgactccccgccgccccgggcccacccgcaagcattaccagccctatgccccaccacgcgacttcgcagcctatcgctcctga

SEQ ID NO: 2878 - DNA, 2868 bp, Artificial Sequence
  Synthetic Polynucleotide
atggccttaccagtgaccgccttgctcctgccgctggccttgctgctccacgccgccaggccggacatccagatgacacagactacatcctccctgtctgcctctctgggagacagagtcaccatcagttgcagggcaagtcaggacattagtaagtacctgaactggtatcagcagaaaccagatggaactgttaaactcctgatctaccatacatcaagattacactcaggagtcccatcaaggttcagtggcagtgggtctggaacagattattctctcaccattagcaacctggagcaagaagatattgccacttacttttgccaacagggtaatacgcttccgtacacgttcggaggggggaccaagctggagatcacactcgaggggaaaccaattcccaaccctcttctgggactggattcaaccggcagcggcgaggacctgaagaacgtgttcccacctgaggtggccgtgttcgagcctagcaaggccgagatcgcccacacccagaaagccaccctcgtgtgcctggctaccggcttctaccccgaccatgtggaactgtcttggtgggtcaacggcaaagaggtgcacagcggcgtgtgtaccgacccccagccactgaaagaacagcccgccctgaacgacagccggtactgcctgagcagcagactgagagtgtccgccaccttctggcagaacccccggaaccacttcagatgccaggtgcagttctacggcctgagcgagaacgacgagtggacccaggacagagccaagcccgtgacccagatcgtgtctgccgaagcctggggcagagccgattgcggcatcaccagcgccagctaccaccagggcgtgctgagcgccaccatcctgtacgagatcctgctgggcaaggccaccctgtacgccgtgctggtgtctgccctggtgctgatggctatggtcaagcggaaggacagccggggaagggccaagcgatctggatctggagcaacaaacttctcactactcaaacaagcaggtgacgtggaggagaatcccgggcctactagtatggactggatttggcgcatccttttccttgtcggcgctgctaccggcgcgcattccttcgaagtgaaactgcaggagtcaggacctggcctggtggcgccctcacagagcctgtccgtcacatgcactgtctcaggggtctcattacccgactatggtgtaagctggattcgccagcctccacgaaagggtctggagtggctgggagtaatatggggtagtgaaaccacatactataattcagctctcaaatccagactgaccatcatcaaggacaactccaagagccaagttttcttaaaaatgaacagtctgcaaactgatgacacagccatttactactgtgccaaacattattactacggtggtagctatgctatggactactggggccaaggaacctcagtcaccgtctcctcaacgcgtgagcagaaactgatctcggaagaggatgggagcggcatccagaaccctgatcctgccgtgtaccagctgcgggatagcaagagcagcgacaagagcgtgtgtctgttcaccgacttcgacagccagaccaacgtgtcccagagcaaggactccgacgtgtacatcaccgataagtgcgtgctggacatgcggagcatggacttcaagagcaactccgccgtggcctggtccaacaagtccgatttcgcctgcgccaacgccttcaacaacagcattatccccgaggacacattcttcccaagcagcgacgtgccctgcgacgtgaagctggtggaaaagagcttcgagacagacaccaacctgaacttccagaacctgagcgtgatcggcttcagaatcctgctgctgaaagtggccggctttaacctgctgatgaccctgcggctgtggtccagccgcgccaagagaagcggatctggcgtgaagcagaccctgaatttcgacctgctgaagctggctggcgacgtggaatccaacccaggcccttctagaggccatatggaacaacggggacagaacgccccggccgcttcgggggcccggaaaaggcacggcccaggacccagggaggcgcggggagccaggcctgggccccgggtccccaagacccttgtgctcgttgtcgccgcggtcctgctgttggtctcagctgagtctgctctgatcacccaacaagacctagctccccagcagagagcggccccacaacaaaagaggtccagcccctcagagggattgtgtccacctggacaccatatctcagaagacggtagagattgcatctcctgcaaatatggacaggactatagcactcactggaatgacctccttttctgcttgcgctgcaccaggtgtgattcaggtgaagtggagctaagtccctgcaccacgaccagaaacacagtgtgtcagtgcgaagaaggcaccttccgggaagaagattctcctgagatgtgccggaagtgccgcacagggtgtcccagagggatggtcaaggtcggtgattgtacaccctggagtgacatcgaatgtgtccacaaagaatcaggtacaaagcacagtggggaagtcccagctgtggaggagacggtgacctccagcccagggactcctgcctctccctgttctctctcaggcatcatcataggagtcacagttgcagccgtagtcttgattgtggctgtgtttgttaggagtaagaggagcaggctcctgcacagtgactacatgaacatgactccccgccgccccgggcccacccgcaagcattaccagccctatgccccaccacgcgacttcgcagcctatcgctcctga

SEQ ID NO: 2879 - DNA, 2286 bp, Artificial Sequence
  Synthetic Polynucleotide
atggccttaccagtgaccgccttgctcctgccgctggccttgctgctccacgccgccaggccggacatccagatgacacagactacatcctccctgtctgcctctctgggagacagagtcaccatcagttgcagggcaagtcaggacattagtaaatatttaaattggtatcagcagaaaccagatggaactgttaaactcctgatctaccatacatcaagattacactcaggagtcccatcaaggttcagtggcagtgggtctggaacagattattctctcaccattagcaacctggagcaagaagatattgccacttacttttgccaacagggtaatacgcttccgtacacgttcggaggggggaccaagctggagatcacaggtggcggtggctcgggcggtggtgggtcgggtggcggcggatctgaggtgaaactgcaggagtcaggacctggcctggtggcgccctcacagagcctgtccgtcacatgcactgtctcaggggtctcattacccgactatggtgtaagctggattcgccagcctccacgaaagggtctggagtggctgggagtaatatggggtagtgaaaccacatactataattcagctctcaaatccagactgaccatcatcaaggacaactccaagagccaagttttcttaaaaatgaacagtctgcaaactgatgacacagccatttactactgtgccaaacattattactacggtggtagctatgctatggactactggggtcaaggaacctcagtcaccgtctcctcacgcgtagagcagaaactgatctcggaagaggatctggcgaagcccaccacgacgccagcgccgcgaccaccaacaccggcgcccaccatcgcgtcgcagcccctgtccctgcgcccagaggcgtgccggccagcggcggggggcgcagtgcacacgagggggctggacttcgcctgtgacatctacatctgggcgcccttggccgggacttgtggggtccttctcctgtcactggttatcaccctttactgcgggcgcgccagagtgaagttcagcaggagcgcagacgcccccgcgtaccagcagggccagaaccagctctataacgagctgaatctaggacgaagagaggagtacgatgttttggacaagagacgtggccgggaccctgagatggggggaaagccgagaaggaagaaccctcaggaaggcctgtacaatgaactgcagaaagataagatggcggaggcctacagtgagattgggatgaaaggcgagcgccggaggggcaaggggcacgatggcctttaccagggtctcagtacagccaccaaggacacctacgacgcccttcacatgcaggccctgccccctcgctctagaggatctggagcaacaaacttctcactactcaaacaagcaggtgacgtggaggagaatcccgggcctgggatccacatggaacaacggggacagaacgccccggccgcttcgggggcccggaaaaggcacggcccaggacccagggaggcgcggggagccaggcctgggccccgggtccccaagacccttgtgctcgttgtcgccgcggtcctgctgttggtctcagctgagtctgctctgatcacccaacaagacctagctccccagcagagagcggccccacaacaaaagaggtccagcccctcagagggattgtgtccacctggacaccatatctcagaagacggtagagattgcatctcctgcaaatatggacaggactatagcactcactggaatgacctccttttctgcttgcgctgcaccaggtgtgattcaggtgaagtggagctaagtccctgcaccacgaccagaaacacagtgtgtcagtgcgaagaaggcaccttccgggaagaagattctcctgagatgtgccggaagtgccgcacagggtgtcccagagggatggtcaaggtcggtgattgtacaccctggagtgacatcgaatgtgtccacaaagaatcaggtacaaagcacagtggggaagtcccagctgtggaggagacggtgacctccagcccagggactcctgcctctccctgttctctctcaggcatcatcataggagtcacagttgcagccgtagtcttgattgtggctgtgtttgttaggagtaagaggagcaggctcctgcacagtgactacatgaacatgactccccgccgccccgggcccacccgcaagcattaccagccctatgccccaccacgcgacttcgcagcctatcgctcctga

SEQ ID NO: 2880 - DNA, 2250 bp, Artificial Sequence
  Synthetic Polynucleotide
atggccttaccagtgaccgccttgctcctgccgctggccttgctgctccacgccgccaggccggacatccagatgacacagactacatcctccctgtctgcctctctgggagacagagtcaccatcagttgcagggcaagtcaggacattagtaaatatttaaattggtatcagcagaaaccagatggaactgttaaactcctgatctaccatacatcaagattacactcaggagtcccatcaaggttcagtggcagtgggtctggaacagattattctctcaccattagcaacctggagcaagaagatattgccacttacttttgccaacagggtaatacgcttccgtacacgttcggaggggggaccaagctggagatcacaggtggcggtggctcgggcggtggtgggtcgggtggcggcggatctgaggtgaaactgcaggagtcaggacctggcctggtggcgccctcacagagcctgtccgtcacatgcactgtctcaggggtctcattacccgactatggtgtaagctggattcgccagcctccacgaaagggtctggagtggctgggagtaatatggggtagtgaaaccacatactataattcagctctcaaatccagactgaccatcatcaaggacaactccaagagccaagttttcttaaaaatgaacagtctgcaaactgatgacacagccatttactactgtgccaaacattattactacggtggtagctatgctatggactactggggtcaaggaacctcagtcaccgtctcctcacgcgtagacggtaacgaggagatgggaggaatcactcaaaccccttacaaagtctcaatttcaggaacaactgttatccttacatgtccccagtatcctggcagcgagatcctttggcagcataacgacaagaatatagggggagatgaagacgataagaatatcggatctgacgaggatcacttgagcctgaaagagttctccgagcttgaacaaagcggatattatgtgtgctatccgcgcgggtcaaagccggaagacgctaacttttacctttatctccgagccagagtgtgcgaaaattgcatggaaatggacgttatgtccgttgctacaatagttatcgtagatatatgcatcacgggtggactgcttctgctggtttattattggtccaagaatagaaaggccaaagctaaacccgtgaccagaggcgctggcgcaggcggaaggcaaaggggacaaaacaaagaacggccaccaccagtgccaaatccagattatgagcctattcggaaaggacagagggacctgtactctggcctgaatcagagaagaatctctagaggatctggagcaacaaacttctcactactcaaacaagcaggtgacgtggaggagaatcccgggcctgggatccacatggaacaacggggacagaacgccccggccgcttcgggggcccggaaaaggcacggcccaggacccagggaggcgcggggagccaggcctgggccccgggtccccaagacccttgtgctcgttgtcgccgcggtcctgctgttggtctcagctgagtctgctctgatcacccaacaagacctagctccccagcagagagcggccccacaacaaaagaggtccagcccctcagagggattgtgtccacctggacaccatatctcagaagacggtagagattgcatctcctgcaaatatggacaggactatagcactcactggaatgacctccttttctgcttgcgctgcaccaggtgtgattcaggtgaagtggagctaagtccctgcaccacgaccagaaacacagtgtgtcagtgcgaagaaggcaccttccgggaagaagattctcctgagatgtgccggaagtgccgcacagggtgtcccagagggatggtcaaggtcggtgattgtacaccctggagtgacatcgaatgtgtccacaaagaatcaggtacaaagcacagtggggaagtcccagctgtggaggagacggtgacctccagcccagggactcctgcctctccctgttctctctcaggcatcatcataggagtcacagttgcagccgtagtcttgattgtggctgtgtttgttaggagtaagaggagcaggctcctgcacagtgactacatgaacatgactccccgccgccccgggcccacccgcaagcattaccagccctatgccccaccacgcgacttcgcagcctatcgctcctga

SEQ ID NO: 2881 - DNA, 2145 bp, Artificial Sequence
  Synthetic Polynucleotide
atggccttaccagtgaccgccttgctcctgccgctggccttgctgctccacgccgccaggccggacatccagatgacacagactacatcctccctgtctgcctctctgggagacagagtcaccatcagttgcagggcaagtcaggacattagtaaatatttaaattggtatcagcagaaaccagatggaactgttaaactcctgatctaccatacatcaagattacactcaggagtcccatcaaggttcagtggcagtgggtctggaacagattattctctcaccattagcaacctggagcaagaagatattgccacttacttttgccaacagggtaatacgcttccgtacacgttcggaggggggaccaagctggagatcacaggtggcggtggctcgggcggtggtgggtcgggtggcggcggatctgaggtgaaactgcaggagtcaggacctggcctggtggcgccctcacagagcctgtccgtcacatgcactgtctcaggggtctcattacccgactatggtgtaagctggattcgccagcctccacgaaagggtctggagtggctgggagtaatatggggtagtgaaaccacatactataattcagctctcaaatccagactgaccatcatcaaggacaactccaagagccaagttttcttaaaaatgaacagtctgcaaactgatgacacagccatttactactgtgccaaacattattactacggtggtagctatgctatggactactggggtcaaggaacctcagtcaccgtctcctcacgcgtattcaagatccccatcgaggaactggaagatcgggtgttcgtgaactgcaacacctctatcacctgggtggaaggcaccgtgggaacactgctgagcgacatcaccagactggacctcggcaagcggattctggaccctcggggcatctacagatgcaacggcaccgacatctacaaggacaaagaaagcaccgtgcaggtccactacagaatgtgccagtcctgcgtggaactggaccctgctacagtggccggcatcatcgtgaccgatgtgatcgctactctgctgctggctctgggagtgttctgcttcgccggacacgaaacaggcagactgtctggcgctgccgatacacaggccctgctgagaaacgaccaagtgtatcagcccctgcgcgacagagatgatgcccagtattctcacctcggcggcaactgggctagaaacaagtctagaggatctggagcaacaaacttctcactactcaaacaagcaggtgacgtggaggagaatcccgggcctgggatccacatggaacaacggggacagaacgccccggccgcttcgggggcccggaaaaggcacggcccaggacccagggaggcgcggggagccaggcctgggccccgggtccccaagacccttgtgctcgttgtcgccgcggtcctgctgttggtctcagctgagtctgctctgatcacccaacaagacctagctccccagcagagagcggccccacaacaaaagaggtccagcccctcagagggattgtgtccacctggacaccatatctcagaagacggtagagattgcatctcctgcaaatatggacaggactatagcactcactggaatgacctccttttctgcttgcgctgcaccaggtgtgattcaggtgaagtggagctaagtccctgcaccacgaccagaaacacagtgtgtcagtgcgaagaaggcaccttccgggaagaagattctcctgagatgtgccggaagtgccgcacagggtgtcccagagggatggtcaaggtcggtgattgtacaccctggagtgacatcgaatgtgtccacaaagaatcaggtacaaagcacagtggggaagtcccagctgtggaggagacggtgacctccagcccagggactcctgcctctccctgttctctctcaggcatcatcataggagtcacagttgcagccgtagtcttgattgtggctgtgtttgttaggagtaagaggagcaggctcctgcacagtgactacatgaacatgactccccgccgccccgggcccacccgcaagcattaccagccctatgccccaccacgcgacttcgcagcctatcgctcctga

SEQ ID NO: 2882 - DNA, 2175 bp, Artificial Sequence
  Synthetic Polynucleotide
atggccttaccagtgaccgccttgctcctgccgctggccttgctgctccacgccgccaggccggacatccagatgacacagactacatcctccctgtctgcctctctgggagacagagtcaccatcagttgcagggcaagtcaggacattagtaaatatttaaattggtatcagcagaaaccagatggaactgttaaactcctgatctaccatacatcaagattacactcaggagtcccatcaaggttcagtggcagtgggtctggaacagattattctctcaccattagcaacctggagcaagaagatattgccacttacttttgccaacagggtaatacgcttccgtacacgttcggaggggggaccaagctggagatcacaggtggcggtggctcgggcggtggtgggtcgggtggcggcggatctgaggtgaaactgcaggagtcaggacctggcctggtggcgccctcacagagcctgtccgtcacatgcactgtctcaggggtctcattacccgactatggtgtaagctggattcgccagcctccacgaaagggtctggagtggctgggagtaatatggggtagtgaaaccacatactataattcagctctcaaatccagactgaccatcatcaaggacaactccaagagccaagttttcttaaaaatgaacagtctgcaaactgatgacacagccatttactactgtgccaaacattattactacggtggtagctatgctatggactactggggtcaaggaacctcagtcaccgtctcctcacgcgtacagagcatcaagggcaaccacctggtcaaggtgtacgactaccaagaggacggcagcgtgctgctgacatgtgatgccgaggccaagaacatcacctggtttaaggacggcaagatgatcggcttcctgaccgaggacaagaagaagtggaacctgggcagcaacgctaaggaccccagaggcatgtatcagtgcaagggcagccagaacaagagcaagcccctccaggtgtactaccggatgtgccagaactgcatcgagctgaacgccgctaccatcagcggctttctgttcgccgagatcgtgtccatcttcgtgctggccgtgggcgtgtactttatcgctggacaggatggcgtgcggcagagcagagcttccgataagcaaaccctgctgcctaacgaccagctgtaccagcctctgaaggacagagaggacgaccagtacagccacctccagggcaatcagctgagaagaaactctagaggatctggagcaacaaacttctcactactcaaacaagcaggtgacgtggaggagaatcccgggcctgggatccacatggaacaacggggacagaacgccccggccgcttcgggggcccggaaaaggcacggcccaggacccagggaggcgcggggagccaggcctgggccccgggtccccaagacccttgtgctcgttgtcgccgcggtcctgctgttggtctcagctgagtctgctctgatcacccaacaagacctagctccccagcagagagcggccccacaacaaaagaggtccagcccctcagagggattgtgtccacctggacaccatatctcagaagacggtagagattgcatctcctgcaaatatggacaggactatagcactcactggaatgacctccttttctgcttgcgctgcaccaggtgtgattcaggtgaagtggagctaagtccctgcaccacgaccagaaacacagtgtgtcagtgcgaagaaggcaccttccgggaagaagattctcctgagatgtgccggaagtgccgcacagggtgtcccagagggatggtcaaggtcggtgattgtacaccctggagtgacatcgaatgtgtccacaaagaatcaggtacaaagcacagtggggaagtcccagctgtggaggagacggtgacctccagcccagggactcctgcctctccctgttctctctcaggcatcatcataggagtcacagttgcagccgtagtcttgattgtggctgtgtttgttaggagtaagaggagcaggctcctgcacagtgactacatgaacatgactccccgccgccccgggcccacccgcaagcattaccagccctatgccccaccacgcgacttcgcagcctatcgctcctga

SEQ ID NO: 2883 - DNA, 2124 bp, Artificial Sequence
  Synthetic Polynucleotide
atggccttaccagtgaccgccttgctcctgccgctggccttgctgctccacgccgccaggccggacatccagatgacacagactacatcctccctgtctgcctctctgggagacagagtcaccatcagttgcagggcaagtcaggacattagtaaatatttaaattggtatcagcagaaaccagatggaactgttaaactcctgatctaccatacatcaagattacactcaggagtcccatcaaggttcagtggcagtgggtctggaacagattattctctcaccattagcaacctggagcaagaagatattgccacttacttttgccaacagggtaatacgcttccgtacacgttcggaggggggaccaagctggagatcacaggtggcggtggctcgggcggtggtgggtcgggtggcggcggatctgaggtgaaactgcaggagtcaggacctggcctggtggcgccctcacagagcctgtccgtcacatgcactgtctcaggggtctcattacccgactatggtgtaagctggattcgccagcctccacgaaagggtctggagtggctgggagtaatatggggtagtgaaaccacatactataattcagctctcaaatccagactgaccatcatcaaggacaactccaagagccaagttttcttaaaaatgaacagtctgcaaactgatgacacagccatttactactgtgccaaacattattactacggtggtagctatgctatggactactggggtcaaggaacctcagtcaccgtctcctcacgcgtacagagttttgggttgttggaccctaaattgtgctatctgttggacggaatcctgttcatttacggagtgatcctgaccgcattgttcctgcgggttaagttttccagatccgcagacgcacccgcttaccaacaagggcagaaccaactctacaatgaacttaatttggggcggagggaagagtacgacgttctggacaaaaggaggggacgagatcccgagatgggcggaaagcctcagcgaaggaagaatccgcaagaggggctttataacgaactccagaaagataaaatggcagaagcctatagtgagattgggatgaagggagaaaggaggaggggtaaaggtcacgatgggttgtaccaaggattgagcacagccactaaagatacctatgatgcgctccacatgcaggccctgccgccaagatctagaggatctggagcaacaaacttctcactactcaaacaagcaggtgacgtggaggagaatcccgggcctgggatccacatggaacaacggggacagaacgccccggccgcttcgggggcccggaaaaggcacggcccaggacccagggaggcgcggggagccaggcctgggccccgggtccccaagacccttgtgctcgttgtcgccgcggtcctgctgttggtctcagctgagtctgctctgatcacccaacaagacctagctccccagcagagagcggccccacaacaaaagaggtccagcccctcagagggattgtgtccacctggacaccatatctcagaagacggtagagattgcatctcctgcaaatatggacaggactatagcactcactggaatgacctccttttctgcttgcgctgcaccaggtgtgattcaggtgaagtggagctaagtccctgcaccacgaccagaaacacagtgtgtcagtgcgaagaaggcaccttccgggaagaagattctcctgagatgtgccggaagtgccgcacagggtgtcccagagggatggtcaaggtcggtgattgtacaccctggagtgacatcgaatgtgtccacaaagaatcaggtacaaagcacagtggggaagtcccagctgtggaggagacggtgacctccagcccagggactcctgcctctccctgttctctctcaggcatcatcataggagtcacagttgcagccgtagtcttgattgtggctgtgtttgttaggagtaagaggagcaggctcctgcacagtgactacatgaacatgactccccgccgccccgggcccacccgcaagcattaccagccctatgccccaccacgcgacttcgcagcctatcgctcctga

SEQ ID NO: 2884 - DNA, 2790 bp, Artificial Sequence
  Synthetic Polynucleotide
atggccttaccagtgaccgccttgctcctgccgctggccttgctgctccacgccgccaggccggacatccagatgacacagactacatcctccctgtctgcctctctgggagacagagtcaccatcagttgcagggcaagtcaggacattagtaagtacctgaactggtatcagcagaaaccagatggaactgttaaactcctgatctaccatacatcaagattacactcaggagtcccatcaaggttcagtggcagtgggtctggaacagattattctctcaccattagcaacctggagcaagaagatattgccacttacttttgccaacagggtaatacgcttccgtacacgttcggaggggggaccaagctggagatcacactcgagggacagcctaaggccaatcctaccgtgacactgttccctccaagcagcgaagaactccaggccaacaaggccacacttgtgtgcctgatctccgacttctaccctggggctgtgacagtggcttggaaggccgatggatctcctgtgaaagccggcgtggaaaccaccaagccatccaagcagagcaacaacaaatacgccgccagctcctacctgagcctgacacctgagcagtggaagtcccacagatcctacagctgccaagtgacccacgaaggcagcaccgtggaaaagacagtggcccctacagagtgcagcggcagagccgattgcggcatcaccagcgccagctaccaccagggcgtgctgagcgccaccatcctgtacgagatcctgctgggcaaggccaccctgtacgccgtgctggtgtctgccctggtgctgatggctatggtcaagcggaaggacagccggggaagggccaagcgatctggatctggagcaacaaacttctcactactcaaacaagcaggtgacgtggaggagaatcccgggcctactagtatggactggatttggcgcatccttttccttgtcggcgctgctaccggcgcgcattccttcgaagtgaaactgcaggagtcaggacctggcctggtggcgccctcacagagcctgtccgtcacatgcactgtctcaggggtctcattacccgactatggtgtaagctggattcgccagcctccacgaaagggtctggagtggctgggagtaatatggggtagtgaaaccacatactataattcagctctcaaatccagactgaccatcatcaaggacaactccaagagccaagttttcttaaaaatgaacagtctgcaaactgatgacacagccatttactactgtgccaaacattattactacggtggtagctatgctatggactactggggccaaggaacctcagtcaccgtctcctcaacgcgtgcctctacaaagggaccctccgtgtttcctctggctcccagcagcaagtctacaagcggaggaacagccgctctgggctgcctggtcaaggattactttcccgagcctgtgaccgtgtcctggaatagcggagcactgacaagcggcgtgcacacctttccagccgtgctgcaaagcagcggcctgtactctctgagcagcgtggtcacagtgcctagctctagcctgggcacccagacctacatctgcaatgtgaaccacaagcctagcaacaccaaggtggacaagagagtggaacccaagagctgtatccccgaggacacattcttcccaagcagcgacgtgccctgcgacgtgaagctggtggaaaagagcttcgagacagacaccaacctgaacttccagaacctgagcgtgatcggcttcagaatcctgctgctgaaagtggccggctttaacctgctgatgaccctgcggctgtggtccagccgcgccaagagaagcggatctggcgtgaagcagaccctgaatttcgacctgctgaagctggctggcgacgtggaatccaacccaggcccttctagaggccatatggaacaacggggacagaacgccccggccgcttcgggggcccggaaaaggcacggcccaggacccagggaggcgcggggagccaggcctgggccccgggtccccaagacccttgtgctcgttgtcgccgcggtcctgctgttggtctcagctgagtctgctctgatcacccaacaagacctagctccccagcagagagcggccccacaacaaaagaggtccagcccctcagagggattgtgtccacctggacaccatatctcagaagacggtagagattgcatctcctgcaaatatggacaggactatagcactcactggaatgacctccttttctgcttgcgctgcaccaggtgtgattcaggtgaagtggagctaagtccctgcaccacgaccagaaacacagtgtgtcagtgcgaagaaggcaccttccgggaagaagattctcctgagatgtgccggaagtgccgcacagggtgtcccagagggatggtcaaggtcggtgattgtacaccctggagtgacatcgaatgtgtccacaaagaatcaggtacaaagcacagtggggaagtcccagctgtggaggagacggtgacctccagcccagggactcctgcctctccctgttctctctcaggcatcatcataggagtcacagttgcagccgtagtcttgattgtggctgtgtttgttaggagtaagaggagcaggctcctgcacagtgactacatgaacatgactccccgccgccccgggcccacccgcaagcattaccagccctatgccccaccacgcgacttcgcagcctatcgctcctga

SEQ ID NO: 2885 - DNA, 2856 bp, Artificial Sequence
  Synthetic Polynucleotide
atggccttaccagtgaccgccttgctcctgccgctggccttgctgctccacgccgccaggccggacatccagatgacacagactacatcctccctgtctgcctctctgggagacagagtcaccatcagttgcagggcaagtcaggacattagtaagtacctgaactggtatcagcagaaaccagatggaactgttaaactcctgatctaccatacatcaagattacactcaggagtcccatcaaggttcagtggcagtgggtctggaacagattattctctcaccattagcaacctggagcaagaagatattgccacttacttttgccaacagggtaatacgcttccgtacacgttcggaggggggaccaagctggagatcacactcgagggacagcctaaggccaatcctaccgtgacactgttccctccaagcagcgaagaactccaggccaacaaggccacacttgtgtgcctgatctccgacttctaccctggggctgtgacagtggcttggaaggccgatggatctcctgtgaaagccggcgtggaaaccaccaagccatccaagcagagcaacaacaaatacgccgccagctcctacctgagcctgacacctgagcagtggaagtcccacagatcctacagctgccaagtgacccacgaaggcagcaccgtggaaaagacagtggcccctacagagtgcagccccatcaagaccgatgtgattacaatggaccccaaggacaactgctccaaggacgccaacgataccctgctgctccagctgaccaacaccagcgcctactacatgtacttgttgctgctgctgaagtccgtggtgtacttcgccatcatcacatgctgcctgctgcggagaaccgccttctgctgcaacggcgagaagtctagggccaagcgatctggatctggagcaacaaacttctcactactcaaacaagcaggtgacgtggaggagaatcccgggcctactagtatggactggatttggcgcatccttttccttgtcggcgctgctaccggcgcgcattccttcgaagtgaaactgcaggagtcaggacctggcctggtggcgccctcacagagcctgtccgtcacatgcactgtctcaggggtctcattacccgactatggtgtaagctggattcgccagcctccacgaaagggtctggagtggctgggagtaatatggggtagtgaaaccacatactataattcagctctcaaatccagactgaccatcatcaaggacaactccaagagccaagttttcttaaaaatgaacagtctgcaaactgatgacacagccatttactactgtgccaaacattattactacggtggtagctatgctatggactactggggccaaggaacctcagtcaccgtctcctcaacgcgtgcctctacaaagggaccctccgtgtttcctctggctcccagcagcaagtctacaagcggaggaacagccgctctgggctgcctggtcaaggattactttcccgagcctgtgaccgtgtcctggaatagcggagcactgacaagcggcgtgcacacctttccagccgtgctgcaaagcagcggcctgtactctctgagcagcgtggtcacagtgcctagctctagcctgggcacccagacctacatctgcaatgtgaaccacaagcctagcaacaccaaggtggacaagagagtggaacccaagagctgtgaagtgaaaaccgactccaccgaccacgtgaagcccaaagagacagagaacaccaagcagcccagcaagagctgccacaagcccaaggccatcgtgcacaccgagaaagtgaacatgatgagcctgaccgtgctgggcctgcggatgctgttcgccaaaaccgtggccgtgaacttcctgctgaccgccaagctgttcttcctccgcgccaagagaagcggatctggcgtgaagcagaccctgaatttcgacctgctgaagctggctggcgacgtggaatccaacccaggcccttctagaggccatatggaacaacggggacagaacgccccggccgcttcgggggcccggaaaaggcacggcccaggacccagggaggcgcggggagccaggcctgggccccgggtccccaagacccttgtgctcgttgtcgccgcggtcctgctgttggtctcagctgagtctgctctgatcacccaacaagacctagctccccagcagagagcggccccacaacaaaagaggtccagcccctcagagggattgtgtccacctggacaccatatctcagaagacggtagagattgcatctcctgcaaatatggacaggactatagcactcactggaatgacctccttttctgcttgcgctgcaccaggtgtgattcaggtgaagtggagctaagtccctgcaccacgaccagaaacacagtgtgtcagtgcgaagaaggcaccttccgggaagaagattctcctgagatgtgccggaagtgccgcacagggtgtcccagagggatggtcaaggtcggtgattgtacaccctggagtgacatcgaatgtgtccacaaagaatcaggtacaaagcacagtggggaagtcccagctgtggaggagacggtgacctccagcccagggactcctgcctctccctgttctctctcaggcatcatcataggagtcacagttgcagccgtagtcttgattgtggctgtgtttgttaggagtaagaggagcaggctcctgcacagtgactacatgaacatgactccccgccgccccgggcccacccgcaagcattaccagccctatgccccaccacgcgacttcgcagcctatcgctcctga

SEQ ID NO: 2886 - DNA, 2757 bp, Artificial Sequence
  Synthetic Polynucleotide
atggccttaccagtgaccgccttgctcctgccgctggccttgctgctccacgccgccaggccgaatgctggcgtgacccagacacctaagttccaggtgctgaaaaccggccagagcatgaccctgcaatgcgcccaggacatgaaccatgagtacatgagctggtacagacaggaccccggcatgggcctgagactgatccactactctgtggctatccagaccaccgaccagggcgaagtgcccaatggctacaacgtgtccagaagcaccatcgaggacttcccactgagactgctgtctgccgctcctagccagaccagcgtgtacttttgtgccagcagctacctgggcaacaccggcgagctgttttttggcgagggcagcagactgaccgtggaggacctgaagaacgtgttcccacctgaggtggccgtgttcgagcctagcaaggccgagatcgcccacacccagaaagccaccctcgtgtgcctggctaccggcttctaccccgaccatgtggaactgtcttggtgggtcaacggcaaagaggtgcacagcggcgtgtgtaccgacccccagccactgaaagaacagcccgccctgaacgacagccggtactgcctgagcagcagactgagagtgtccgccaccttctggcagaacccccggaaccacttcagatgccaggtgcagttctacggcctgagcgagaacgacgagtggacccaggacagagccaagcccgtgacccagatcgtgtctgccgaagcctggggcagagccgattgcggcatcaccagcgccagctaccaccagggcgtgctgagcgccaccatcctgtacgagatcctgctgggcaaggccaccctgtacgccgtgctggtgtctgccctggtgctgatggctatggtcaagcggaaggacagccggggaagggccaagcgatctggatctggagcaacaaacttctcactactcaaacaagcaggtgacgtggaggagaatcccgggcctactagtatggactggatttggcgcatccttttccttgtcggcgctgctaccggcgcgcattccaatgctggcgtgacccagacacctaagttccaggtgctgaaaaccggccagagcatgaccctgcaatgcgcccaggacatgaaccatgagtacatgagctggtacagacaggaccccggcatgggcctgagactgatccactactctgtggctatccagaccaccgaccagggcgaagtgcccaatggctacaacgtgtccagaagcaccatcgaggacttcccactgagactgctgtctgccgctcctagccagaccagcgtgtacttttgtgccagcagctacctgggcaacaccggcgagctgttttttggcgagggcagcagactgaccgtgatccagaaccctgatcctgccgtgtaccagctgcgggatagcaagagcagcgacaagagcgtgtgtctgttcaccgacttcgacagccagaccaacgtgtcccagagcaaggactccgacgtgtacatcaccgataagtgcgtgctggacatgcggagcatggacttcaagagcaactccgccgtggcctggtccaacaagtccgatttcgcctgcgccaacgccttcaacaacagcattatccccgaggacacattcttcccaagcagcgacgtgccctgcgacgtgaagctggtggaaaagagcttcgagacagacaccaacctgaacttccagaacctgagcgtgatcggcttcagaatcctgctgctgaaagtggccggctttaacctgctgatgaccctgcggctgtggtccagccgcgccaagagaagcggatctggcgtgaagcagaccctgaatttcgacctgctgaagctggctggcgacgtggaatccaacccaggcccttctagaggccatatggaacaacggggacagaacgccccggccgcttcgggggcccggaaaaggcacggcccaggacccagggaggcgcggggagccaggcctgggccccgggtccccaagacccttgtgctcgttgtcgccgcggtcctgctgttggtctcagctgagtctgctctgatcacccaacaagacctagctccccagcagagagcggccccacaacaaaagaggtccagcccctcagagggattgtgtccacctggacaccatatctcagaagacggtagagattgcatctcctgcaaatatggacaggactatagcactcactggaatgacctccttttctgcttgcgctgcaccaggtgtgattcaggtgaagtggagctaagtccctgcaccacgaccagaaacacagtgtgtcagtgcgaagaaggcaccttccgggaagaagattctcctgagatgtgccggaagtgccgcacagggtgtcccagagggatggtcaaggtcggtgattgtacaccctggagtgacatcgaatgtgtccacaaagaatcaggtacaaagcacagtggggaagtcccagctgtggaggagacggtgacctccagcccagggactcctgcctctccctgttctctctcaggcatcatcataggagtcacagttgcagccgtagtcttgattgtggctgtgtttgttaggagtaagaggagcaggctcctgcacagtgactacatgaacatgactccccgccgccccgggcccacccgcaagcattaccagccctatgccccaccacgcgacttcgcagcctatcgctcctga

SEQ ID NO: 2887 - DNA, 2769 bp, Artificial Sequence
  Synthetic Polynucleotide
atgctcctgctgctcgtcccagtgctcgaggtgatttttaccctgggaggaaccagagcccagtcggtgacccagcttggcagccacgtctctgtctctgagggagccctggttctgctgaggtgcaactactcatcgtctgttccaccatatctcttctggtatgtgcaataccccaaccaaggactccagcttctcctgaagcacacaacaggggccaccctggttaaaggcatcaacggttttgaggctgaatttaagaagagtgaaacctccttccacctgacgaaaccctcagcccatatgagcgacgcggctgagtacttctgtgctgtgagtgattctagggctgcaggcaacaagctaacttttggaggaggaaccagggtgctagttaaaccaaatatccagaaccctgaccctgccgtgtaccagctgagagactctaaatccagtgacaagtctgtctgcctattcaccgattttgattctcaaacaaatgtgtcacaaagtaaggattctgatgtgtatatcacagacaaaactgtgctagacatgaggtctatggacttcaagagcaacagtgctgtggcctggagcaacaaatctgactttgcatgtgcaaacgccttcaacaacagcattattccagaagacaccttcttccccagcccagaaagttcctgtgatgtcaagctggtcgagaaaagctttgaaacagatacgaacctaaactttcaaaacctgtcagtgattgggttccgaatcctcctcctgaaagtggccgggtttaatctgctcatgacgctgcggctgtggtccagcagggccaagcgatctggatctggagcaacaaacttctcactactcaaacaagcaggtgacgtggaggagaatcccgggcctactagtatgggaatcaggctcctctgtcgtgtggccttttgtttcctggctgtaggcctcgtagatgtgaaagtaacccagagctcgagatatctagtcaaaaggacgggagagaaagtttttctggaatgtgtccaggatatggaccatgaaaatatgttctggtatcgacaagacccaggtctggggctacggctgatctatttctcatatgatgttaaaatgaaagaaaaaggagatattcctgaggggtacagtgtctctagagagaagaaggagcgcttctccctgattctggagtccgccagcaccaaccagacatctatgtacctctgtgccagcagattccccgggacagcctataattcacccctccactttgggaatgggaccaggctcactgtgacagaggacctgaacaaggtgttcccacccgaggtcgctgtgtttgagccatcagaagcagagatctcccacacccaaaaggccacactggtgtgcctggccacaggcttcttccctgaccacgtggagctgagctggtgggtgaatgggaaggaggtgcacagtggggtcagcacggacccgcagcccctcaaggagcagcccgccctcaatgactccagatactgcctgagcagccgcctgagggtctcggccaccttctggcagaacccccgcaaccacttccgctgtcaagtccagttctacgggctctcggagaatgacgagtggacccaggatagggccaaacccgtcacccagatcgtcagcgccgaggcctggggtagagcagactgtggctttacctcggtgtcctaccagcaaggggtcctgtctgccaccatcctctatgagatcctgctagggaaggccaccctgtatgctgtgctggtcagcgcccttgtgttgatggccatggtcaagagaaaggatttctgacgcgccaagagaagcggatctggcgtgaagcagaccctgaatttcgacctgctgaagctggctggcgacgtggaatccaacccaggcccttctagaggccatatggaacaacggggacagaacgccccggccgcttcgggggcccggaaaaggcacggcccaggacccagggaggcgcggggagccaggcctgggccccgggtccccaagacccttgtgctcgttgtcgccgcggtcctgctgttggtctcagctgagtctgctctgatcacccaacaagacctagctccccagcagagagcggccccacaacaaaagaggtccagcccctcagagggattgtgtccacctggacaccatatctcagaagacggtagagattgcatctcctgcaaatatggacaggactatagcactcactggaatgacctccttttctgcttgcgctgcaccaggtgtgattcaggtgaagtggagctaagtccctgcaccacgaccagaaacacagtgtgtcagtgcgaagaaggcaccttccgggaagaagattctcctgagatgtgccggaagtgccgcacagggtgtcccagagggatggtcaaggtcggtgattgtacaccctggagtgacatcgaatgtgtccacaaagaatcaggtacaaagcacagtggggaagtcccagctgtggaggagacggtgacctccagcccagggactcctgcctctccctgttctctctcaggcatcatcataggagtcacagttgcagccgtagtcttgattgtggctgtgtttgttaggagtaagaggagcaggctcctgcacagtgactacatgaacatgactccccgccgccccgggcccacccgcaagcattaccagccctatgccccaccacgcgacttcgcagcctatcgctcctga

SEQ ID NO: 2888 - DNA, 23 bp, Artificial Sequence
  Synthetic Polynucleotide
  misc_feature (1)..(23): n is a, c, g, or t
nnnnnnnnnnnnnnnnnnnnnnn

SEQ ID NO: 2889 - DNA, 2397 bp, Artificial Sequence
  Synthetic Polynucleotide
atggccttaccagtgaccgccttgctcctgccgctggccttgctgctccacgccgccaggccggacatccagatgacacagactacatcctccctgtctgcctctctgggagacagagtcaccatcagttgcagggcaagtcaggacattagtaaatatttaaattggtatcagcagaaaccagatggaactgttaaactcctgatctaccatacatcaagattacactcaggagtcccatcaaggttcagtggcagtgggtctggaacagattattctctcaccattagcaacctggagcaagaagatattgccacttacttttgccaacagggtaatacgcttccgtacacgttcggaggggggaccaagctggagatcacaggtggcggtggctcgggcggtggtgggtcgggtggcggcggatctgaggtgaaactgcaggagtcaggacctggcctggtggcgccctcacagagcctgtccgtcacatgcactgtctcaggggtctcattacccgactatggtgtaagctggattcgccagcctccacgaaagggtctggagtggctgggagtaatatggggtagtgaaaccacatactataattcagctctcaaatccagactgaccatcatcaaggacaactccaagagccaagttttcttaaaaatgaacagtctgcaaactgatgacacagccatttactactgtgccaaacattattactacggtggtagctatgctatggactactggggtcaaggaacctcagtcaccgtctcctcacgcgtagagcagaaactgatctcggaagaggatctggcgaagcccaccacgacgccagcgccgcgaccaccaacaccggcgcccaccatcgcgtcgcagcccctgtccctgcgcccagaggcgtgccggccagcggcggggggcgcagtgcacacgagggggctggacttcgcctgtgacatctacatctgggcgcccttggccgggacttgtggggtccttctcctgtcactggttatcaccctttactgcaaacggggcagaaagaaactcctgtatatattcaaacaaccatttatgagaccagtacaaactactcaagaggaagatggctgtagctgccgatttccagaagaagaagaaggaggatgtgaactgagagtgaagttcagcaggagcgcagacgcccccgcgtaccagcagggccagaaccagctctataacgagctgaatctaggacgaagagaggagtacgatgttttggacaagagacgtggccgggaccctgagatggggggaaagccgagaaggaagaaccctcaggaaggcctgtacaatgaactgcagaaagataagatggcggaggcctacagtgagattgggatgaaaggcgagcgccggaggggcaaggggcacgatggcctttaccagggtctcagtacagccaccaaggacacctacgacgcccttcacatgcaggccctgccccctcgctctagtggctccggcgagggcagaggaagtctactaacctgcggagatgtggaagaaaatcctggcccacatatggaacaacggggacagaacgccccggccgcttcgggggcccggaaaaggcacggcccaggacccagggaggcgcggggagccaggcctgggccccgggtccccaagacccttgtgctcgttgtcgccgcggtcctgctgttggtctcagctgagtctgctctgatcacccaacaagacctagctccccagcagagagcggccccacaacaaaagaggtccagcccctcagagggattgtgtccacctggacaccatatctcagaagacggtagagattgcatctcctgcaaatatggacaggactatagcactcactggaatgacctccttttctgcttgcgctgcaccaggtgtgattcaggtgaagtggagctaagtccctgcaccacgaccagaaacacagtgtgtcagtgcgaagaaggcaccttccgggaagaagattctcctgagatgtgccggaagtgccgcacagggtgtcccagagggatggtcaaggtcggtgattgtacaccctggagtgacatcgaatgtgtccacaaagaatcaggtacaaagcacagtggggaagtcccagctgtggaggagacggtgacctccagcccagggactcctgcctctccctgttctctctcaggcatcatcataggagtcacagttgcagccgtagtcttgattgtggctgtgtttgttaaacggggcagaaagaaactcctgtatatattcaaacaaccatttatgagaccagtacaaactactcaagaggaagatggctgtagctgccgatttccagaagaagaagaaggaggatgtgaactgtga

SEQ ID NO: 2890 - DNA, 2871 bp, Artificial Sequence
  Synthetic Polynucleotide
atggccttaccagtgaccgccttgctcctgccgctggccttgctgctccacgccgccaggccggacatccagatgacacagactacatcctccctgtctgcctctctgggagacagagtcaccatcagttgcagggcaagtcaggacattagtaagtacctgaactggtatcagcagaaaccagatggaactgttaaactcctgatctaccatacatcaagattacactcaggagtcccatcaaggttcagtggcagtgggtctggaacagattattctctcaccattagcaacctggagcaagaagatattgccacttacttttgccaacagggtaatacgcttccgtacacgttcggaggggggaccaagctggagatcacactcgaggggaaaccaattcccaaccctcttctgggactggattcaaccggcagcggcgaggacctgaagaacgtgttcccacctgaggtggccgtgttcgagcctagcaaggccgagatcgcccacacccagaaagccaccctcgtgtgcctggctaccggcttctaccccgaccatgtggaactgtcttggtgggtcaacggcaaagaggtgcacagcggcgtgtgtaccgacccccagccactgaaagaacagcccgccctgaacgacagccggtactgcctgagcagcagactgagagtgtccgccaccttctggcagaacccccggaaccacttcagatgccaggtgcagttctacggcctgagcgagaacgacgagtggacccaggacagagccaagcccgtgacccagatcgtgtctgccgaagcctggggcagagccgattgcggcatcaccagcgccagctaccaccagggcgtgctgagcgccaccatcctgtacgagatcctgctgggcaaggccaccctgtacgccgtgctggtgtctgccctggtgctgatggctatggtcaagcggaaggacagccggggaagggccaagcgatctggatctggagcaacaaacttctcactactcaaacaagcaggtgacgtggaggagaatcccgggcctactagtatggactggatttggcgcatccttttccttgtcggcgctgctaccggcgcgcattccttcgaagtgaaactgcaggagtcaggacctggcctggtggcgccctcacagagcctgtccgtcacatgcactgtctcaggggtctcattacccgactatggtgtaagctggattcgccagcctccacgaaagggtctggagtggctgggagtaatatggggtagtgaaaccacatactataattcagctctcaaatccagactgaccatcatcaaggacaactccaagagccaagttttcttaaaaatgaacagtctgcaaactgatgacacagccatttactactgtgccaaacattattactacggtggtagctatgctatggactactggggccaaggaacctcagtcaccgtctcctcaacgcgtgagcagaaactgatctcggaagaggatgggagcggcatccagaaccctgatcctgccgtgtaccagctgcgggatagcaagagcagcgacaagagcgtgtgtctgttcaccgacttcgacagccagaccaacgtgtcccagagcaaggactccgacgtgtacatcaccgataagtgcgtgctggacatgcggagcatggacttcaagagcaactccgccgtggcctggtccaacaagtccgatttcgcctgcgccaacgccttcaacaacagcattatccccgaggacacattcttcccaagcagcgacgtgccctgcgacgtgaagctggtggaaaagagcttcgagacagacaccaacctgaacttccagaacctgagcgtgatcggcttcagaatcctgctgctgaaagtggccggctttaacctgctgatgaccctgcggctgtggtccagccgcgccaagagaagcggatctggcgtgaagcagaccctgaatttcgacctgctgaagctggctggcgacgtggaatccaacccaggcccttctagaggccatatggaacaacggggacagaacgccccggccgcttcgggggcccggaaaaggcacggcccaggacccagggaggcgcggggagccaggcctgggccccgggtccccaagacccttgtgctcgttgtcgccgcggtcctgctgttggtctcagctgagtctgctctgatcacccaacaagacctagctccccagcagagagcggccccacaacaaaagaggtccagcccctcagagggattgtgtccacctggacaccatatctcagaagacggtagagattgcatctcctgcaaatatggacaggactatagcactcactggaatgacctccttttctgcttgcgctgcaccaggtgtgattcaggtgaagtggagctaagtccctgcaccacgaccagaaacacagtgtgtcagtgcgaagaaggcaccttccgggaagaagattctcctgagatgtgccggaagtgccgcacagggtgtcccagagggatggtcaaggtcggtgattgtacaccctggagtgacatcgaatgtgtccacaaagaatcaggtacaaagcacagtggggaagtcccagctgtggaggagacggtgacctccagcccagggactcctgcctctccctgttctctctcaggcatcatcataggagtcacagttgcagccgtagtcttgattgtggctgtgtttgttaaacggggcagaaagaaactcctgtatatattcaaacaaccatttatgagaccagtacaaactactcaagaggaagatggctgtagctgccgatttccagaagaagaagaaggaggatgtgaactgtga

SEQ ID NO: 2891 - DNA, 2289 bp, Artificial Sequence
  Synthetic Polynucleotide
atggccttaccagtgaccgccttgctcctgccgctggccttgctgctccacgccgccaggccggacatccagatgacacagactacatcctccctgtctgcctctctgggagacagagtcaccatcagttgcagggcaagtcaggacattagtaaatatttaaattggtatcagcagaaaccagatggaactgttaaactcctgatctaccatacatcaagattacactcaggagtcccatcaaggttcagtggcagtgggtctggaacagattattctctcaccattagcaacctggagcaagaagatattgccacttacttttgccaacagggtaatacgcttccgtacacgttcggaggggggaccaagctggagatcacaggtggcggtggctcgggcggtggtgggtcgggtggcggcggatctgaggtgaaactgcaggagtcaggacctggcctggtggcgccctcacagagcctgtccgtcacatgcactgtctcaggggtctcattacccgactatggtgtaagctggattcgccagcctccacgaaagggtctggagtggctgggagtaatatggggtagtgaaaccacatactataattcagctctcaaatccagactgaccatcatcaaggacaactccaagagccaagttttcttaaaaatgaacagtctgcaaactgatgacacagccatttactactgtgccaaacattattactacggtggtagctatgctatggactactggggtcaaggaacctcagtcaccgtctcctcacgcgtagagcagaaactgatctcggaagaggatctggcgaagcccaccacgacgccagcgccgcgaccaccaacaccggcgcccaccatcgcgtcgcagcccctgtccctgcgcccagaggcgtgccggccagcggcggggggcgcagtgcacacgagggggctggacttcgcctgtgacatctacatctgggcgcccttggccgggacttgtggggtccttctcctgtcactggttatcaccctttactgcgggcgcgccagagtgaagttcagcaggagcgcagacgcccccgcgtaccagcagggccagaaccagctctataacgagctgaatctaggacgaagagaggagtacgatgttttggacaagagacgtggccgggaccctgagatggggggaaagccgagaaggaagaaccctcaggaaggcctgtacaatgaactgcagaaagataagatggcggaggcctacagtgagattgggatgaaaggcgagcgccggaggggcaaggggcacgatggcctttaccagggtctcagtacagccaccaaggacacctacgacgcccttcacatgcaggccctgccccctcgctctagaggatctggagcaacaaacttctcactactcaaacaagcaggtgacgtggaggagaatcccgggcctgggatccacatggaacaacggggacagaacgccccggccgcttcgggggcccggaaaaggcacggcccaggacccagggaggcgcggggagccaggcctgggccccgggtccccaagacccttgtgctcgttgtcgccgcggtcctgctgttggtctcagctgagtctgctctgatcacccaacaagacctagctccccagcagagagcggccccacaacaaaagaggtccagcccctcagagggattgtgtccacctggacaccatatctcagaagacggtagagattgcatctcctgcaaatatggacaggactatagcactcactggaatgacctccttttctgcttgcgctgcaccaggtgtgattcaggtgaagtggagctaagtccctgcaccacgaccagaaacacagtgtgtcagtgcgaagaaggcaccttccgggaagaagattctcctgagatgtgccggaagtgccgcacagggtgtcccagagggatggtcaaggtcggtgattgtacaccctggagtgacatcgaatgtgtccacaaagaatcaggtacaaagcacagtggggaagtcccagctgtggaggagacggtgacctccagcccagggactcctgcctctccctgttctctctcaggcatcatcataggagtcacagttgcagccgtagtcttgattgtggctgtgtttgttaaacggggcagaaagaaactcctgtatatattcaaacaaccatttatgagaccagtacaaactactcaagaggaagatggctgtagctgccgatttccagaagaagaagaaggaggatgtgaactgtga

SEQ ID NO: 2892 - DNA, 2253 bp, Artificial Sequence
  Synthetic Polynucleotide
atggccttaccagtgaccgccttgctcctgccgctggccttgctgctccacgccgccaggccggacatccagatgacacagactacatcctccctgtctgcctctctgggagacagagtcaccatcagttgcagggcaagtcaggacattagtaaatatttaaattggtatcagcagaaaccagatggaactgttaaactcctgatctaccatacatcaagattacactcaggagtcccatcaaggttcagtggcagtgggtctggaacagattattctctcaccattagcaacctggagcaagaagatattgccacttacttttgccaacagggtaatacgcttccgtacacgttcggaggggggaccaagctggagatcacaggtggcggtggctcgggcggtggtgggtcgggtggcggcggatctgaggtgaaactgcaggagtcaggacctggcctggtggcgccctcacagagcctgtccgtcacatgcactgtctcaggggtctcattacccgactatggtgtaagctggattcgccagcctccacgaaagggtctggagtggctgggagtaatatggggtagtgaaaccacatactataattcagctctcaaatccagactgaccatcatcaaggacaactccaagagccaagttttcttaaaaatgaacagtctgcaaactgatgacacagccatttactactgtgccaaacattattactacggtggtagctatgctatggactactggggtcaaggaacctcagtcaccgtctcctcacgcgtagacggtaacgaggagatgggaggaatcactcaaaccccttacaaagtctcaatttcaggaacaactgttatccttacatgtccccagtatcctggcagcgagatcctttggcagcataacgacaagaatatagggggagatgaagacgataagaatatcggatctgacgaggatcacttgagcctgaaagagttctccgagcttgaacaaagcggatattatgtgtgctatccgcgcgggtcaaagccggaagacgctaacttttacctttatctccgagccagagtgtgcgaaaattgcatggaaatggacgttatgtccgttgctacaatagttatcgtagatatatgcatcacgggtggactgcttctgctggtttattattggtccaagaatagaaaggccaaagctaaacccgtgaccagaggcgctggcgcaggcggaaggcaaaggggacaaaacaaagaacggccaccaccagtgccaaatccagattatgagcctattcggaaaggacagagggacctgtactctggcctgaatcagagaagaatctctagaggatctggagcaacaaacttctcactactcaaacaagcaggtgacgtggaggagaatcccgggcctgggatccacatggaacaacggggacagaacgccccggccgcttcgggggcccggaaaaggcacggcccaggacccagggaggcgcggggagccaggcctgggccccgggtccccaagacccttgtgctcgttgtcgccgcggtcctgctgttggtctcagctgagtctgctctgatcacccaacaagacctagctccccagcagagagcggccccacaacaaaagaggtccagcccctcagagggattgtgtccacctggacaccatatctcagaagacggtagagattgcatctcctgcaaatatggacaggactatagcactcactggaatgacctccttttctgcttgcgctgcaccaggtgtgattcaggtgaagtggagctaagtccctgcaccacgaccagaaacacagtgtgtcagtgcgaagaaggcaccttccgggaagaagattctcctgagatgtgccggaagtgccgcacagggtgtcccagagggatggtcaaggtcggtgattgtacaccctggagtgacatcgaatgtgtccacaaagaatcaggtacaaagcacagtggggaagtcccagctgtggaggagacggtgacctccagcccagggactcctgcctctccctgttctctctcaggcatcatcataggagtcacagttgcagccgtagtcttgattgtggctgtgtttgttaaacggggcagaaagaaactcctgtatatattcaaacaaccatttatgagaccagtacaaactactcaagaggaagatggctgtagctgccgatttccagaagaagaagaaggaggatgtgaactgtga

SEQ ID NO: 2893 - DNA, 2148 bp, Artificial Sequence
  Synthetic Polynucleotide
atggccttaccagtgaccgccttgctcctgccgctggccttgctgctccacgccgccaggccggacatccagatgacacagactacatcctccctgtctgcctctctgggagacagagtcaccatcagttgcagggcaagtcaggacattagtaaatatttaaattggtatcagcagaaaccagatggaactgttaaactcctgatctaccatacatcaagattacactcaggagtcccatcaaggttcagtggcagtgggtctggaacagattattctctcaccattagcaacctggagcaagaagatattgccacttacttttgccaacagggtaatacgcttccgtacacgttcggaggggggaccaagctggagatcacaggtggcggtggctcgggcggtggtgggtcgggtggcggcggatctgaggtgaaactgcaggagtcaggacctggcctggtggcgccctcacagagcctgtccgtcacatgcactgtctcaggggtctcattacccgactatggtgtaagctggattcgccagcctccacgaaagggtctggagtggctgggagtaatatggggtagtgaaaccacatactataattcagctctcaaatccagactgaccatcatcaaggacaactccaagagccaagttttcttaaaaatgaacagtctgcaaactgatgacacagccatttactactgtgccaaacattattactacggtggtagctatgctatggactactggggtcaaggaacctcagtcaccgtctcctcacgcgtattcaagatccccatcgaggaactggaagatcgggtgttcgtgaactgcaacacctctatcacctgggtggaaggcaccgtgggaacactgctgagcgacatcaccagactggacctcggcaagcggattctggaccctcggggcatctacagatgcaacggcaccgacatctacaaggacaaagaaagcaccgtgcaggtccactacagaatgtgccagtcctgcgtggaactggaccctgctacagtggccggcatcatcgtgaccgatgtgatcgctactctgctgctggctctgggagtgttctgcttcgccggacacgaaacaggcagactgtctggcgctgccgatacacaggccctgctgagaaacgaccaagtgtatcagcccctgcgcgacagagatgatgcccagtattctcacctcggcggcaactgggctagaaacaagtctagaggatctggagcaacaaacttctcactactcaaacaagcaggtgacgtggaggagaatcccgggcctgggatccacatggaacaacggggacagaacgccccggccgcttcgggggcccggaaaaggcacggcccaggacccagggaggcgcggggagccaggcctgggccccgggtccccaagacccttgtgctcgttgtcgccgcggtcctgctgttggtctcagctgagtctgctctgatcacccaacaagacctagctccccagcagagagcggccccacaacaaaagaggtccagcccctcagagggattgtgtccacctggacaccatatctcagaagacggtagagattgcatctcctgcaaatatggacaggactatagcactcactggaatgacctccttttctgcttgcgctgcaccaggtgtgattcaggtgaagtggagctaagtccctgcaccacgaccagaaacacagtgtgtcagtgcgaagaaggcaccttccgggaagaagattctcctgagatgtgccggaagtgccgcacagggtgtcccagagggatggtcaaggtcggtgattgtacaccctggagtgacatcgaatgtgtccacaaagaatcaggtacaaagcacagtggggaagtcccagctgtggaggagacggtgacctccagcccagggactcctgcctctccctgttctctctcaggcatcatcataggagtcacagttgcagccgtagtcttgattgtggctgtgtttgttaaacggggcagaaagaaactcctgtatatattcaaacaaccatttatgagaccagtacaaactactcaagaggaagatggctgtagctgccgatttccagaagaagaagaaggaggatgtgaactgtga

SEQ ID NO: 2894 - DNA, 2178 bp, Artificial Sequence
  Synthetic Polynucleotide
atggccttaccagtgaccgccttgctcctgccgctggccttgctgctccacgccgccaggccggacatccagatgacacagactacatcctccctgtctgcctctctgggagacagagtcaccatcagttgcagggcaagtcaggacattagtaaatatttaaattggtatcagcagaaaccagatggaactgttaaactcctgatctaccatacatcaagattacactcaggagtcccatcaaggttcagtggcagtgggtctggaacagattattctctcaccattagcaacctggagcaagaagatattgccacttacttttgccaacagggtaatacgcttccgtacacgttcggaggggggaccaagctggagatcacaggtggcggtggctcgggcggtggtgggtcgggtggcggcggatctgaggtgaaactgcaggagtcaggacctggcctggtggcgccctcacagagcctgtccgtcacatgcactgtctcaggggtctcattacccgactatggtgtaagctggattcgccagcctccacgaaagggtctggagtggctgggagtaatatggggtagtgaaaccacatactataattcagctctcaaatccagactgaccatcatcaaggacaactccaagagccaagttttcttaaaaatgaacagtctgcaaactgatgacacagccatttactactgtgccaaacattattactacggtggtagctatgctatggactactggggtcaaggaacctcagtcaccgtctcctcacgcgtacagagcatcaagggcaaccacctggtcaaggtgtacgactaccaagaggacggcagcgtgctgctgacatgtgatgccgaggccaagaacatcacctggtttaaggacggcaagatgatcggcttcctgaccgaggacaagaagaagtggaacctgggcagcaacgctaaggaccccagaggcatgtatcagtgcaagggcagccagaacaagagcaagcccctccaggtgtactaccggatgtgccagaactgcatcgagctgaacgccgctaccatcagcggctttctgttcgccgagatcgtgtccatcttcgtgctggccgtgggcgtgtactttatcgctggacaggatggcgtgcggcagagcagagcttccgataagcaaaccctgctgcctaacgaccagctgtaccagcctctgaaggacagagaggacgaccagtacagccacctccagggcaatcagctgagaagaaactctagaggatctggagcaacaaacttctcactactcaaacaagcaggtgacgtggaggagaatcccgggcctgggatccacatggaacaacggggacagaacgccccggccgcttcgggggcccggaaaaggcacggcccaggacccagggaggcgcggggagccaggcctgggccccgggtccccaagacccttgtgctcgttgtcgccgcggtcctgctgttggtctcagctgagtctgctctgatcacccaacaagacctagctccccagcagagagcggccccacaacaaaagaggtccagcccctcagagggattgtgtccacctggacaccatatctcagaagacggtagagattgcatctcctgcaaatatggacaggactatagcactcactggaatgacctccttttctgcttgcgctgcaccaggtgtgattcaggtgaagtggagctaagtccctgcaccacgaccagaaacacagtgtgtcagtgcgaagaaggcaccttccgggaagaagattctcctgagatgtgccggaagtgccgcacagggtgtcccagagggatggtcaaggtcggtgattgtacaccctggagtgacatcgaatgtgtccacaaagaatcaggtacaaagcacagtggggaagtcccagctgtggaggagacggtgacctccagcccagggactcctgcctctccctgttctctctcaggcatcatcataggagtcacagttgcagccgtagtcttgattgtggctgtgtttgttaaacggggcagaaagaaactcctgtatatattcaaacaaccatttatgagaccagtacaaactactcaagaggaagatggctgtagctgccgatttccagaagaagaagaaggaggatgtgaactgtga

SEQ ID NO: 2895 - DNA, 2127 bp, Artificial Sequence
  Synthetic Polynucleotide
atggccttaccagtgaccgccttgctcctgccgctggccttgctgctccacgccgccaggccggacatccagatgacacagactacatcctccctgtctgcctctctgggagacagagtcaccatcagttgcagggcaagtcaggacattagtaaatatttaaattggtatcagcagaaaccagatggaactgttaaactcctgatctaccatacatcaagattacactcaggagtcccatcaaggttcagtggcagtgggtctggaacagattattctctcaccattagcaacctggagcaagaagatattgccacttacttttgccaacagggtaatacgcttccgtacacgttcggaggggggaccaagctggagatcacaggtggcggtggctcgggcggtggtgggtcgggtggcggcggatctgaggtgaaactgcaggagtcaggacctggcctggtggcgccctcacagagcctgtccgtcacatgcactgtctcaggggtctcattacccgactatggtgtaagctggattcgccagcctccacgaaagggtctggagtggctgggagtaatatggggtagtgaaaccacatactataattcagctctcaaatccagactgaccatcatcaaggacaactccaagagccaagttttcttaaaaatgaacagtctgcaaactgatgacacagccatttactactgtgccaaacattattactacggtggtagctatgctatggactactggggtcaaggaacctcagtcaccgtctcctcacgcgtacagagttttgggttgttggaccctaaattgtgctatctgttggacggaatcctgttcatttacggagtgatcctgaccgcattgttcctgcgggttaagttttccagatccgcagacgcacccgcttaccaacaagggcagaaccaactctacaatgaacttaatttggggcggagggaagagtacgacgttctggacaaaaggaggggacgagatcccgagatgggcggaaagcctcagcgaaggaagaatccgcaagaggggctttataacgaactccagaaagataaaatggcagaagcctatagtgagattgggatgaagggagaaaggaggaggggtaaaggtcacgatgggttgtaccaaggattgagcacagccactaaagatacctatgatgcgctccacatgcaggccctgccgccaagatctagaggatctggagcaacaaacttctcactactcaaacaagcaggtgacgtggaggagaatcccgggcctgggatccacatggaacaacggggacagaacgccccggccgcttcgggggcccggaaaaggcacggcccaggacccagggaggcgcggggagccaggcctgggccccgggtccccaagacccttgtgctcgttgtcgccgcggtcctgctgttggtctcagctgagtctgctctgatcacccaacaagacctagctccccagcagagagcggccccacaacaaaagaggtccagcccctcagagggattgtgtccacctggacaccatatctcagaagacggtagagattgcatctcctgcaaatatggacaggactatagcactcactggaatgacctccttttctgcttgcgctgcaccaggtgtgattcaggtgaagtggagctaagtccctgcaccacgaccagaaacacagtgtgtcagtgcgaagaaggcaccttccgggaagaagattctcctgagatgtgccggaagtgccgcacagggtgtcccagagggatggtcaaggtcggtgattgtacaccctggagtgacatcgaatgtgtccacaaagaatcaggtacaaagcacagtggggaagtcccagctgtggaggagacggtgacctccagcccagggactcctgcctctccctgttctctctcaggcatcatcataggagtcacagttgcagccgtagtcttgattgtggctgtgtttgttaaacggggcagaaagaaactcctgtatatattcaaacaaccatttatgagaccagtacaaactactcaagaggaagatggctgtagctgccgatttccagaagaagaagaaggaggatgtgaactgtga

SEQ ID NO: 2896 - DNA, 2793 bp, Artificial Sequence
  Synthetic Polynucleotide
atggccttaccagtgaccgccttgctcctgccgctggccttgctgctccacgccgccaggccggacatccagatgacacagactacatcctccctgtctgcctctctgggagacagagtcaccatcagttgcagggcaagtcaggacattagtaagtacctgaactggtatcagcagaaaccagatggaactgttaaactcctgatctaccatacatcaagattacactcaggagtcccatcaaggttcagtggcagtgggtctggaacagattattctctcaccattagcaacctggagcaagaagatattgccacttacttttgccaacagggtaatacgcttccgtacacgttcggaggggggaccaagctggagatcacactcgagggacagcctaaggccaatcctaccgtgacactgttccctccaagcagcgaagaactccaggccaacaaggccacacttgtgtgcctgatctccgacttctaccctggggctgtgacagtggcttggaaggccgatggatctcctgtgaaagccggcgtggaaaccaccaagccatccaagcagagcaacaacaaatacgccgccagctcctacctgagcctgacacctgagcagtggaagtcccacagatcctacagctgccaagtgacccacgaaggcagcaccgtggaaaagacagtggcccctacagagtgcagcggcagagccgattgcggcatcaccagcgccagctaccaccagggcgtgctgagcgccaccatcctgtacgagatcctgctgggcaaggccaccctgtacgccgtgctggtgtctgccctggtgctgatggctatggtcaagcggaaggacagccggggaagggccaagcgatctggatctggagcaacaaacttctcactactcaaacaagcaggtgacgtggaggagaatcccgggcctactagtatggactggatttggcgcatccttttccttgtcggcgctgctaccggcgcgcattccttcgaagtgaaactgcaggagtcaggacctggcctggtggcgccctcacagagcctgtccgtcacatgcactgtctcaggggtctcattacccgactatggtgtaagctggattcgccagcctccacgaaagggtctggagtggctgggagtaatatggggtagtgaaaccacatactataattcagctctcaaatccagactgaccatcatcaaggacaactccaagagccaagttttcttaaaaatgaacagtctgcaaactgatgacacagccatttactactgtgccaaacattattactacggtggtagctatgctatggactactggggccaaggaacctcagtcaccgtctcctcaacgcgtgcctctacaaagggaccctccgtgtttcctctggctcccagcagcaagtctacaagcggaggaacagccgctctgggctgcctggtcaaggattactttcccgagcctgtgaccgtgtcctggaatagcggagcactgacaagcggcgtgcacacctttccagccgtgctgcaaagcagcggcctgtactctctgagcagcgtggtcacagtgcctagctctagcctgggcacccagacctacatctgcaatgtgaaccacaagcctagcaacaccaaggtggacaagagagtggaacccaagagctgtatccccgaggacacattcttcccaagcagcgacgtgccctgcgacgtgaagctggtggaaaagagcttcgagacagacaccaacctgaacttccagaacctgagcgtgatcggcttcagaatcctgctgctgaaagtggccggctttaacctgctgatgaccctgcggctgtggtccagccgcgccaagagaagcggatctggcgtgaagcagaccctgaatttcgacctgctgaagctggctggcgacgtggaatccaacccaggcccttctagaggccatatggaacaacggggacagaacgccccggccgcttcgggggcccggaaaaggcacggcccaggacccagggaggcgcggggagccaggcctgggccccgggtccccaagacccttgtgctcgttgtcgccgcggtcctgctgttggtctcagctgagtctgctctgatcacccaacaagacctagctccccagcagagagcggccccacaacaaaagaggtccagcccctcagagggattgtgtccacctggacaccatatctcagaagacggtagagattgcatctcctgcaaatatggacaggactatagcactcactggaatgacctccttttctgcttgcgctgcaccaggtgtgattcaggtgaagtggagctaagtccctgcaccacgaccagaaacacagtgtgtcagtgcgaagaaggcaccttccgggaagaagattctcctgagatgtgccggaagtgccgcacagggtgtcccagagggatggtcaaggtcggtgattgtacaccctggagtgacatcgaatgtgtccacaaagaatcaggtacaaagcacagtggggaagtcccagctgtggaggagacggtgacctccagcccagggactcctgcctctccctgttctctctcaggcatcatcataggagtcacagttgcagccgtagtcttgattgtggctgtgtttgttaaacggggcagaaagaaactcctgtatatattcaaacaaccatttatgagaccagtacaaactactcaagaggaagatggctgtagctgccgatttccagaagaagaagaaggaggatgtgaactgtga

SEQ ID NO: 2897 - DNA, 2859 bp, Artificial Sequence
  Synthetic Polynucleotide
atggccttaccagtgaccgccttgctcctgccgctggccttgctgctccacgccgccaggccggacatccagatgacacagactacatcctccctgtctgcctctctgggagacagagtcaccatcagttgcagggcaagtcaggacattagtaagtacctgaactggtatcagcagaaaccagatggaactgttaaactcctgatctaccatacatcaagattacactcaggagtcccatcaaggttcagtggcagtgggtctggaacagattattctctcaccattagcaacctggagcaagaagatattgccacttacttttgccaacagggtaatacgcttccgtacacgttcggaggggggaccaagctggagatcacactcgagggacagcctaaggccaatcctaccgtgacactgttccctccaagcagcgaagaactccaggccaacaaggccacacttgtgtgcctgatctccgacttctaccctggggctgtgacagtggcttggaaggccgatggatctcctgtgaaagccggcgtggaaaccaccaagccatccaagcagagcaacaacaaatacgccgccagctcctacctgagcctgacacctgagcagtggaagtcccacagatcctacagctgccaagtgacccacgaaggcagcaccgtggaaaagacagtggcccctacagagtgcagccccatcaagaccgatgtgattacaatggaccccaaggacaactgctccaaggacgccaacgataccctgctgctccagctgaccaacaccagcgcctactacatgtacttgttgctgctgctgaagtccgtggtgtacttcgccatcatcacatgctgcctgctgcggagaaccgccttctgctgcaacggcgagaagtctagggccaagcgatctggatctggagcaacaaacttctcactactcaaacaagcaggtgacgtggaggagaatcccgggcctactagtatggactggatttggcgcatccttttccttgtcggcgctgctaccggcgcgcattccttcgaagtgaaactgcaggagtcaggacctggcctggtggcgccctcacagagcctgtccgtcacatgcactgtctcaggggtctcattacccgactatggtgtaagctggattcgccagcctccacgaaagggtctggagtggctgggagtaatatggggtagtgaaaccacatactataattcagctctcaaatccagactgaccatcatcaaggacaactccaagagccaagttttcttaaaaatgaacagtctgcaaactgatgacacagccatttactactgtgccaaacattattactacggtggtagctatgctatggactactggggccaaggaacctcagtcaccgtctcctcaacgcgtgcctctacaaagggaccctccgtgtttcctctggctcccagcagcaagtctacaagcggaggaacagccgctctgggctgcctggtcaaggattactttcccgagcctgtgaccgtgtcctggaatagcggagcactgacaagcggcgtgcacacctttccagccgtgctgcaaagcagcggcctgtactctctgagcagcgtggtcacagtgcctagctctagcctgggcacccagacctacatctgcaatgtgaaccacaagcctagcaacaccaaggtggacaagagagtggaacccaagagctgtgaagtgaaaaccgactccaccgaccacgtgaagcccaaagagacagagaacaccaagcagcccagcaagagctgccacaagcccaaggccatcgtgcacaccgagaaagtgaacatgatgagcctgaccgtgctgggcctgcggatgctgttcgccaaaaccgtggccgtgaacttcctgctgaccgccaagctgttcttcctccgcgccaagagaagcggatctggcgtgaagcagaccctgaatttcgacctgctgaagctggctggcgacgtggaatccaacccaggcccttctagaggccatatggaacaacggggacagaacgccccggccgcttcgggggcccggaaaaggcacggcccaggacccagggaggcgcggggagccaggcctgggccccgggtccccaagacccttgtgctcgttgtcgccgcggtcctgctgttggtctcagctgagtctgctctgatcacccaacaagacctagctccccagcagagagcggccccacaacaaaagaggtccagcccctcagagggattgtgtccacctggacaccatatctcagaagacggtagagattgcatctcctgcaaatatggacaggactatagcactcactggaatgacctccttttctgcttgcgctgcaccaggtgtgattcaggtgaagtggagctaagtccctgcaccacgaccagaaacacagtgtgtcagtgcgaagaaggcaccttccgggaagaagattctcctgagatgtgccggaagtgccgcacagggtgtcccagagggatggtcaaggtcggtgattgtacaccctggagtgacatcgaatgtgtccacaaagaatcaggtacaaagcacagtggggaagtcccagctgtggaggagacggtgacctccagcccagggactcctgcctctccctgttctctctcaggcatcatcataggagtcacagttgcagccgtagtcttgattgtggctgtgtttgttaaacggggcagaaagaaactcctgtatatattcaaacaaccatttatgagaccagtacaaactactcaagaggaagatggctgtagctgccgatttccagaagaagaagaaggaggatgtgaactgtga

SEQ ID NO: 2898 - DNA, 2760 bp, Artificial Sequence
  Synthetic Polynucleotide
atggccttaccagtgaccgccttgctcctgccgctggccttgctgctccacgccgccaggccgaatgctggcgtgacccagacacctaagttccaggtgctgaaaaccggccagagcatgaccctgcaatgcgcccaggacatgaaccatgagtacatgagctggtacagacaggaccccggcatgggcctgagactgatccactactctgtggctatccagaccaccgaccagggcgaagtgcccaatggctacaacgtgtccagaagcaccatcgaggacttcccactgagactgctgtctgccgctcctagccagaccagcgtgtacttttgtgccagcagctacctgggcaacaccggcgagctgttttttggcgagggcagcagactgaccgtggaggacctgaagaacgtgttcccacctgaggtggccgtgttcgagcctagcaaggccgagatcgcccacacccagaaagccaccctcgtgtgcctggctaccggcttctaccccgaccatgtggaactgtcttggtgggtcaacggcaaagaggtgcacagcggcgtgtgtaccgacccccagccactgaaagaacagcccgccctgaacgacagccggtactgcctgagcagcagactgagagtgtccgccaccttctggcagaacccccggaaccacttcagatgccaggtgcagttctacggcctgagcgagaacgacgagtggacccaggacagagccaagcccgtgacccagatcgtgtctgccgaagcctggggcagagccgattgcggcatcaccagcgccagctaccaccagggcgtgctgagcgccaccatcctgtacgagatcctgctgggcaaggccaccctgtacgccgtgctggtgtctgccctggtgctgatggctatggtcaagcggaaggacagccggggaagggccaagcgatctggatctggagcaacaaacttctcactactcaaacaagcaggtgacgtggaggagaatcccgggcctactagtatggactggatttggcgcatccttttccttgtcggcgctgctaccggcgcgcattccaatgctggcgtgacccagacacctaagttccaggtgctgaaaaccggccagagcatgaccctgcaatgcgcccaggacatgaaccatgagtacatgagctggtacagacaggaccccggcatgggcctgagactgatccactactctgtggctatccagaccaccgaccagggcgaagtgcccaatggctacaacgtgtccagaagcaccatcgaggacttcccactgagactgctgtctgccgctcctagccagaccagcgtgtacttttgtgccagcagctacctgggcaacaccggcgagctgttttttggcgagggcagcagactgaccgtgatccagaaccctgatcctgccgtgtaccagctgcgggatagcaagagcagcgacaagagcgtgtgtctgttcaccgacttcgacagccagaccaacgtgtcccagagcaaggactccgacgtgtacatcaccgataagtgcgtgctggacatgcggagcatggacttcaagagcaactccgccgtggcctggtccaacaagtccgatttcgcctgcgccaacgccttcaacaacagcattatccccgaggacacattcttcccaagcagcgacgtgccctgcgacgtgaagctggtggaaaagagcttcgagacagacaccaacctgaacttccagaacctgagcgtgatcggcttcagaatcctgctgctgaaagtggccggctttaacctgctgatgaccctgcggctgtggtccagccgcgccaagagaagcggatctggcgtgaagcagaccctgaatttcgacctgctgaagctggctggcgacgtggaatccaacccaggcccttctagaggccatatggaacaacggggacagaacgccccggccgcttcgggggcccggaaaaggcacggcccaggacccagggaggcgcggggagccaggcctgggccccgggtccccaagacccttgtgctcgttgtcgccgcggtcctgctgttggtctcagctgagtctgctctgatcacccaacaagacctagctccccagcagagagcggccccacaacaaaagaggtccagcccctcagagggattgtgtccacctggacaccatatctcagaagacggtagagattgcatctcctgcaaatatggacaggactatagcactcactggaatgacctccttttctgcttgcgctgcaccaggtgtgattcaggtgaagtggagctaagtccctgcaccacgaccagaaacacagtgtgtcagtgcgaagaaggcaccttccgggaagaagattctcctgagatgtgccggaagtgccgcacagggtgtcccagagggatggtcaaggtcggtgattgtacaccctggagtgacatcgaatgtgtccacaaagaatcaggtacaaagcacagtggggaagtcccagctgtggaggagacggtgacctccagcccagggactcctgcctctccctgttctctctcaggcatcatcataggagtcacagttgcagccgtagtcttgattgtggctgtgtttgttaaacggggcagaaagaaactcctgtatatattcaaacaaccatttatgagaccagtacaaactactcaagaggaagatggctgtagctgccgatttccagaagaagaagaaggaggatgtgaactgtga

SEQ ID NO: 2899 - DNA, 2772 bp, Artificial Sequence
  Synthetic Polynucleotide
atgctcctgctgctcgtcccagtgctcgaggtgatttttaccctgggaggaaccagagcccagtcggtgacccagcttggcagccacgtctctgtctctgagggagccctggttctgctgaggtgcaactactcatcgtctgttccaccatatctcttctggtatgtgcaataccccaaccaaggactccagcttctcctgaagcacacaacaggggccaccctggttaaaggcatcaacggttttgaggctgaatttaagaagagtgaaacctccttccacctgacgaaaccctcagcccatatgagcgacgcggctgagtacttctgtgctgtgagtgattctagggctgcaggcaacaagctaacttttggaggaggaaccagggtgctagttaaaccaaatatccagaaccctgaccctgccgtgtaccagctgagagactctaaatccagtgacaagtctgtctgcctattcaccgattttgattctcaaacaaatgtgtcacaaagtaaggattctgatgtgtatatcacagacaaaactgtgctagacatgaggtctatggacttcaagagcaacagtgctgtggcctggagcaacaaatctgactttgcatgtgcaaacgccttcaacaacagcattattccagaagacaccttcttccccagcccagaaagttcctgtgatgtcaagctggtcgagaaaagctttgaaacagatacgaacctaaactttcaaaacctgtcagtgattgggttccgaatcctcctcctgaaagtggccgggtttaatctgctcatgacgctgcggctgtggtccagcagggccaagcgatctggatctggagcaacaaacttctcactactcaaacaagcaggtgacgtggaggagaatcccgggcctactagtatgggaatcaggctcctctgtcgtgtggccttttgtttcctggctgtaggcctcgtagatgtgaaagtaacccagagctcgagatatctagtcaaaaggacgggagagaaagtttttctggaatgtgtccaggatatggaccatgaaaatatgttctggtatcgacaagacccaggtctggggctacggctgatctatttctcatatgatgttaaaatgaaagaaaaaggagatattcctgaggggtacagtgtctctagagagaagaaggagcgcttctccctgattctggagtccgccagcaccaaccagacatctatgtacctctgtgccagcagattccccgggacagcctataattcacccctccactttgggaatgggaccaggctcactgtgacagaggacctgaacaaggtgttcccacccgaggtcgctgtgtttgagccatcagaagcagagatctcccacacccaaaaggccacactggtgtgcctggccacaggcttcttccctgaccacgtggagctgagctggtgggtgaatgggaaggaggtgcacagtggggtcagcacggacccgcagcccctcaaggagcagcccgccctcaatgactccagatactgcctgagcagccgcctgagggtctcggccaccttctggcagaacccccgcaaccacttccgctgtcaagtccagttctacgggctctcggagaatgacgagtggacccaggatagggccaaacccgtcacccagatcgtcagcgccgaggcctggggtagagcagactgtggctttacctcggtgtcctaccagcaaggggtcctgtctgccaccatcctctatgagatcctgctagggaaggccaccctgtatgctgtgctggtcagcgcccttgtgttgatggccatggtcaagagaaaggatttctgacgcgccaagagaagcggatctggcgtgaagcagaccctgaatttcgacctgctgaagctggctggcgacgtggaatccaacccaggcccttctagaggccatatggaacaacggggacagaacgccccggccgcttcgggggcccggaaaaggcacggcccaggacccagggaggcgcggggagccaggcctgggccccgggtccccaagacccttgtgctcgttgtcgccgcggtcctgctgttggtctcagctgagtctgctctgatcacccaacaagacctagctccccagcagagagcggccccacaacaaaagaggtccagcccctcagagggattgtgtccacctggacaccatatctcagaagacggtagagattgcatctcctgcaaatatggacaggactatagcactcactggaatgacctccttttctgcttgcgctgcaccaggtgtgattcaggtgaagtggagctaagtccctgcaccacgaccagaaacacagtgtgtcagtgcgaagaaggcaccttccgggaagaagattctcctgagatgtgccggaagtgccgcacagggtgtcccagagggatggtcaaggtcggtgattgtacaccctggagtgacatcgaatgtgtccacaaagaatcaggtacaaagcacagtggggaagtcccagctgtggaggagacggtgacctccagcccagggactcctgcctctccctgttctctctcaggcatcatcataggagtcacagttgcagccgtagtcttgattgtggctgtgtttgttaaacggggcagaaagaaactcctgtatatattcaaacaaccatttatgagaccagtacaaactactcaagaggaagatggctgtagctgccgatttccagaagaagaagaaggaggatgtgaactgtga

SEQ ID NO: 2900 - DNA, 23 bp, Artificial Sequence
  Synthetic Polynucleotide
  misc_feature (1)..(23): n is a, c, g, or t
nnnnnnnnnnnnnnnnnnnnnnn

SEQ ID NO: 2901 - DNA, 2382 bp, Artificial Sequence
  Synthetic Polynucleotide
atggccttaccagtgaccgccttgctcctgccgctggccttgctgctccacgccgccaggccggacatccagatgacacagactacatcctccctgtctgcctctctgggagacagagtcaccatcagttgcagggcaagtcaggacattagtaaatatttaaattggtatcagcagaaaccagatggaactgttaaactcctgatctaccatacatcaagattacactcaggagtcccatcaaggttcagtggcagtgggtctggaacagattattctctcaccattagcaacctggagcaagaagatattgccacttacttttgccaacagggtaatacgcttccgtacacgttcggaggggggaccaagctggagatcacaggtggcggtggctcgggcggtggtgggtcgggtggcggcggatctgaggtgaaactgcaggagtcaggacctggcctggtggcgccctcacagagcctgtccgtcacatgcactgtctcaggggtctcattacccgactatggtgtaagctggattcgccagcctccacgaaagggtctggagtggctgggagtaatatggggtagtgaaaccacatactataattcagctctcaaatccagactgaccatcatcaaggacaactccaagagccaagttttcttaaaaatgaacagtctgcaaactgatgacacagccatttactactgtgccaaacattattactacggtggtagctatgctatggactactggggtcaaggaacctcagtcaccgtctcctcacgcgtagagcagaaactgatctcggaagaggatctggcgaagcccaccacgacgccagcgccgcgaccaccaacaccggcgcccaccatcgcgtcgcagcccctgtccctgcgcccagaggcgtgccggccagcggcggggggcgcagtgcacacgagggggctggacttcgcctgtgacatctacatctgggcgcccttggccgggacttgtggggtccttctcctgtcactggttatcaccctttactgcaaacggggcagaaagaaactcctgtatatattcaaacaaccatttatgagaccagtacaaactactcaagaggaagatggctgtagctgccgatttccagaagaagaagaaggaggatgtgaactgagagtgaagttcagcaggagcgcagacgcccccgcgtaccagcagggccagaaccagctctataacgagctgaatctaggacgaagagaggagtacgatgttttggacaagagacgtggccgggaccctgagatggggggaaagccgagaaggaagaaccctcaggaaggcctgtacaatgaactgcagaaagataagatggcggaggcctacagtgagattgggatgaaaggcgagcgccggaggggcaaggggcacgatggcctttaccagggtctcagtacagccaccaaggacacctacgacgcccttcacatgcaggccctgccccctcgctctagtggctccggcgagggcagaggaagtctactaacctgcggagatgtggaagaaaatcctggcccacatatggaacaacggggacagaacgccccggccgcttcgggggcccggaaaaggcacggcccaggacccagggaggcgcggggagccaggcctgggccccgggtccccaagacccttgtgctcgttgtcgccgcggtcctgctgttggtctcagctgagtctgctctgatcacccaacaagacctagctccccagcagagagcggccccacaacaaaagaggtccagcccctcagagggattgtgtccacctggacaccatatctcagaagacggtagagattgcatctcctgcaaatatggacaggactatagcactcactggaatgacctccttttctgcttgcgctgcaccaggtgtgattcaggtgaagtggagctaagtccctgcaccacgaccagaaacacagtgtgtcagtgcgaagaaggcaccttccgggaagaagattctcctgagatgtgccggaagtgccgcacagggtgtcccagagggatggtcaaggtcggtgattgtacaccctggagtgacatcgaatgtgtccacaaagaatcaggtacaaagcacagtggggaagtcccagctgtggaggagacggtgacctccagcccagggactcctgcctctccctgttctctctcaggcatcatcataggagtcacagttgcagccgtagtcttgattgtggctgtgtttgttcggagggaccagaggctgccccccgatgcccacaagccccctgggggaggcagtttccggacccccatccaagaggagcaggccgacgcccactccaccctggccaagatctga

SEQ ID NO: 2902 - DNA, 2856 bp, Artificial Sequence
  Synthetic Polynucleotide
atggccttaccagtgaccgccttgctcctgccgctggccttgctgctccacgccgccaggccggacatccagatgacacagactacatcctccctgtctgcctctctgggagacagagtcaccatcagttgcagggcaagtcaggacattagtaagtacctgaactggtatcagcagaaaccagatggaactgttaaactcctgatctaccatacatcaagattacactcaggagtcccatcaaggttcagtggcagtgggtctggaacagattattctctcaccattagcaacctggagcaagaagatattgccacttacttttgccaacagggtaatacgcttccgtacacgttcggaggggggaccaagctggagatcacactcgaggggaaaccaattcccaaccctcttctgggactggattcaaccggcagcggcgaggacctgaagaacgtgttcccacctgaggtggccgtgttcgagcctagcaaggccgagatcgcccacacccagaaagccaccctcgtgtgcctggctaccggcttctaccccgaccatgtggaactgtcttggtgggtcaacggcaaagaggtgcacagcggcgtgtgtaccgacccccagccactgaaagaacagcccgccctgaacgacagccggtactgcctgagcagcagactgagagtgtccgccaccttctggcagaacccccggaaccacttcagatgccaggtgcagttctacggcctgagcgagaacgacgagtggacccaggacagagccaagcccgtgacccagatcgtgtctgccgaagcctggggcagagccgattgcggcatcaccagcgccagctaccaccagggcgtgctgagcgccaccatcctgtacgagatcctgctgggcaaggccaccctgtacgccgtgctggtgtctgccctggtgctgatggctatggtcaagcggaaggacagccggggaagggccaagcgatctggatctggagcaacaaacttctcactactcaaacaagcaggtgacgtggaggagaatcccgggcctactagtatggactggatttggcgcatccttttccttgtcggcgctgctaccggcgcgcattccttcgaagtgaaactgcaggagtcaggacctggcctggtggcgccctcacagagcctgtccgtcacatgcactgtctcaggggtctcattacccgactatggtgtaagctggattcgccagcctccacgaaagggtctggagtggctgggagtaatatggggtagtgaaaccacatactataattcagctctcaaatccagactgaccatcatcaaggacaactccaagagccaagttttcttaaaaatgaacagtctgcaaactgatgacacagccatttactactgtgccaaacattattactacggtggtagctatgctatggactactggggccaaggaacctcagtcaccgtctcctcaacgcgtgagcagaaactgatctcggaagaggatgggagcggcatccagaaccctgatcctgccgtgtaccagctgcgggatagcaagagcagcgacaagagcgtgtgtctgttcaccgacttcgacagccagaccaacgtgtcccagagcaaggactccgacgtgtacatcaccgataagtgcgtgctggacatgcggagcatggacttcaagagcaactccgccgtggcctggtccaacaagtccgatttcgcctgcgccaacgccttcaacaacagcattatccccgaggacacattcttcccaagcagcgacgtgccctgcgacgtgaagctggtggaaaagagcttcgagacagacaccaacctgaacttccagaacctgagcgtgatcggcttcagaatcctgctgctgaaagtggccggctttaacctgctgatgaccctgcggctgtggtccagccgcgccaagagaagcggatctggcgtgaagcagaccctgaatttcgacctgctgaagctggctggcgacgtggaatccaacccaggcccttctagaggccatatggaacaacggggacagaacgccccggccgcttcgggggcccggaaaaggcacggcccaggacccagggaggcgcggggagccaggcctgggccccgggtccccaagacccttgtgctcgttgtcgccgcggtcctgctgttggtctcagctgagtctgctctgatcacccaacaagacctagctccccagcagagagcggccccacaacaaaagaggtccagcccctcagagggattgtgtccacctggacaccatatctcagaagacggtagagattgcatctcctgcaaatatggacaggactatagcactcactggaatgacctccttttctgcttgcgctgcaccaggtgtgattcaggtgaagtggagctaagtccctgcaccacgaccagaaacacagtgtgtcagtgcgaagaaggcaccttccgggaagaagattctcctgagatgtgccggaagtgccgcacagggtgtcccagagggatggtcaaggtcggtgattgtacaccctggagtgacatcgaatgtgtccacaaagaatcaggtacaaagcacagtggggaagtcccagctgtggaggagacggtgacctccagcccagggactcctgcctctccctgttctctctcaggcatcatcataggagtcacagttgcagccgtagtcttgattgtggctgtgtttgttcggagggaccagaggctgccccccgatgcccacaagccccctgggggaggcagtttccggacccccatccaagaggagcaggccgacgcccactccaccctggccaagatctga

SEQ ID NO: 2903 - DNA, 2274 bp, Artificial Sequence
  Synthetic Polynucleotide
atggccttaccagtgaccgccttgctcctgccgctggccttgctgctccacgccgccaggccggacatccagatgacacagactacatcctccctgtctgcctctctgggagacagagtcaccatcagttgcagggcaagtcaggacattagtaaatatttaaattggtatcagcagaaaccagatggaactgttaaactcctgatctaccatacatcaagattacactcaggagtcccatcaaggttcagtggcagtgggtctggaacagattattctctcaccattagcaacctggagcaagaagatattgccacttacttttgccaacagggtaatacgcttccgtacacgttcggaggggggaccaagctggagatcacaggtggcggtggctcgggcggtggtgggtcgggtggcggcggatctgaggtgaaactgcaggagtcaggacctggcctggtggcgccctcacagagcctgtccgtcacatgcactgtctcaggggtctcattacccgactatggtgtaagctggattcgccagcctccacgaaagggtctggagtggctgggagtaatatggggtagtgaaaccacatactataattcagctctcaaatccagactgaccatcatcaaggacaactccaagagccaagttttcttaaaaatgaacagtctgcaaactgatgacacagccatttactactgtgccaaacattattactacggtggtagctatgctatggactactggggtcaaggaacctcagtcaccgtctcctcacgcgtagagcagaaactgatctcggaagaggatctggcgaagcccaccacgacgccagcgccgcgaccaccaacaccggcgcccaccatcgcgtcgcagcccctgtccctgcgcccagaggcgtgccggccagcggcggggggcgcagtgcacacgagggggctggacttcgcctgtgacatctacatctgggcgcccttggccgggacttgtggggtccttctcctgtcactggttatcaccctttactgcgggcgcgccagagtgaagttcagcaggagcgcagacgcccccgcgtaccagcagggccagaaccagctctataacgagctgaatctaggacgaagagaggagtacgatgttttggacaagagacgtggccgggaccctgagatggggggaaagccgagaaggaagaaccctcaggaaggcctgtacaatgaactgcagaaagataagatggcggaggcctacagtgagattgggatgaaaggcgagcgccggaggggcaaggggcacgatggcctttaccagggtctcagtacagccaccaaggacacctacgacgcccttcacatgcaggccctgccccctcgctctagaggatctggagcaacaaacttctcactactcaaacaagcaggtgacgtggaggagaatcccgggcctgggatccacatggaacaacggggacagaacgccccggccgcttcgggggcccggaaaaggcacggcccaggacccagggaggcgcggggagccaggcctgggccccgggtccccaagacccttgtgctcgttgtcgccgcggtcctgctgttggtctcagctgagtctgctctgatcacccaacaagacctagctccccagcagagagcggccccacaacaaaagaggtccagcccctcagagggattgtgtccacctggacaccatatctcagaagacggtagagattgcatctcctgcaaatatggacaggactatagcactcactggaatgacctccttttctgcttgcgctgcaccaggtgtgattcaggtgaagtggagctaagtccctgcaccacgaccagaaacacagtgtgtcagtgcgaagaaggcaccttccgggaagaagattctcctgagatgtgccggaagtgccgcacagggtgtcccagagggatggtcaaggtcggtgattgtacaccctggagtgacatcgaatgtgtccacaaagaatcaggtacaaagcacagtggggaagtcccagctgtggaggagacggtgacctccagcccagggactcctgcctctccctgttctctctcaggcatcatcataggagtcacagttgcagccgtagtcttgattgtggctgtgtttgttcggagggaccagaggctgccccccgatgcccacaagccccctgggggaggcagtttccggacccccatccaagaggagcaggccgacgcccactccaccctggccaagatctga

SEQ ID NO: 2904 - DNA, 2238 bp, Artificial Sequence
  Synthetic Polynucleotide
atggccttaccagtgaccgccttgctcctgccgctggccttgctgctccacgccgccaggccggacatccagatgacacagactacatcctccctgtctgcctctctgggagacagagtcaccatcagttgcagggcaagtcaggacattagtaaatatttaaattggtatcagcagaaaccagatggaactgttaaactcctgatctaccatacatcaagattacactcaggagtcccatcaaggttcagtggcagtgggtctggaacagattattctctcaccattagcaacctggagcaagaagatattgccacttacttttgccaacagggtaatacgcttccgtacacgttcggaggggggaccaagctggagatcacaggtggcggtggctcgggcggtggtgggtcgggtggcggcggatctgaggtgaaactgcaggagtcaggacctggcctggtggcgccctcacagagcctgtccgtcacatgcactgtctcaggggtctcattacccgactatggtgtaagctggattcgccagcctccacgaaagggtctggagtggctgggagtaatatggggtagtgaaaccacatactataattcagctctcaaatccagactgaccatcatcaaggacaactccaagagccaagttttcttaaaaatgaacagtctgcaaactgatgacacagccatttactactgtgccaaacattattactacggtggtagctatgctatggactactggggtcaaggaacctcagtcaccgtctcctcacgcgtagacggtaacgaggagatgggaggaatcactcaaaccccttacaaagtctcaatttcaggaacaactgttatccttacatgtccccagtatcctggcagcgagatcctttggcagcataacgacaagaatatagggggagatgaagacgataagaatatcggatctgacgaggatcacttgagcctgaaagagttctccgagcttgaacaaagcggatattatgtgtgctatccgcgcgggtcaaagccggaagacgctaacttttacctttatctccgagccagagtgtgcgaaaattgcatggaaatggacgttatgtccgttgctacaatagttatcgtagatatatgcatcacgggtggactgcttctgctggtttattattggtccaagaatagaaaggccaaagctaaacccgtgaccagaggcgctggcgcaggcggaaggcaaaggggacaaaacaaagaacggccaccaccagtgccaaatccagattatgagcctattcggaaaggacagagggacctgtactctggcctgaatcagagaagaatctctagaggatctggagcaacaaacttctcactactcaaacaagcaggtgacgtggaggagaatcccgggcctgggatccacatggaacaacggggacagaacgccccggccgcttcgggggcccggaaaaggcacggcccaggacccagggaggcgcggggagccaggcctgggccccgggtccccaagacccttgtgctcgttgtcgccgcggtcctgctgttggtctcagctgagtctgctctgatcacccaacaagacctagctccccagcagagagcggccccacaacaaaagaggtccagcccctcagagggattgtgtccacctggacaccatatctcagaagacggtagagattgcatctcctgcaaatatggacaggactatagcactcactggaatgacctccttttctgcttgcgctgcaccaggtgtgattcaggtgaagtggagctaagtccctgcaccacgaccagaaacacagtgtgtcagtgcgaagaaggcaccttccgggaagaagattctcctgagatgtgccggaagtgccgcacagggtgtcccagagggatggtcaaggtcggtgattgtacaccctggagtgacatcgaatgtgtccacaaagaatcaggtacaaagcacagtggggaagtcccagctgtggaggagacggtgacctccagcccagggactcctgcctctccctgttctctctcaggcatcatcataggagtcacagttgcagccgtagtcttgattgtggctgtgtttgttcggagggaccagaggctgccccccgatgcccacaagccccctgggggaggcagtttccggacccccatccaagaggagcaggccgacgcccactccaccctggccaagatctga

SEQ ID NO: 2905 - DNA, 2133 bp, Artificial Sequence
  Synthetic Polynucleotide
atggccttaccagtgaccgccttgctcctgccgctggccttgctgctccacgccgccaggccggacatccagatgacacagactacatcctccctgtctgcctctctgggagacagagtcaccatcagttgcagggcaagtcaggacattagtaaatatttaaattggtatcagcagaaaccagatggaactgttaaactcctgatctaccatacatcaagattacactcaggagtcccatcaaggttcagtggcagtgggtctggaacagattattctctcaccattagcaacctggagcaagaagatattgccacttacttttgccaacagggtaatacgcttccgtacacgttcggaggggggaccaagctggagatcacaggtggcggtggctcgggcggtggtgggtcgggtggcggcggatctgaggtgaaactgcaggagtcaggacctggcctggtggcgccctcacagagcctgtccgtcacatgcactgtctcaggggtctcattacccgactatggtgtaagctggattcgccagcctccacgaaagggtctggagtggctgggagtaatatggggtagtgaaaccacatactataattcagctctcaaatccagactgaccatcatcaaggacaactccaagagccaagttttcttaaaaatgaacagtctgcaaactgatgacacagccatttactactgtgccaaacattattactacggtggtagctatgctatggactactggggtcaaggaacctcagtcaccgtctcctcacgcgtattcaagatccccatcgaggaactggaagatcgggtgttcgtgaactgcaacacctctatcacctgggtggaaggcaccgtgggaacactgctgagcgacatcaccagactggacctcggcaagcggattctggaccctcggggcatctacagatgcaacggcaccgacatctacaaggacaaagaaagcaccgtgcaggtccactacagaatgtgccagtcctgcgtggaactggaccctgctacagtggccggcatcatcgtgaccgatgtgatcgctactctgctgctggctctgggagtgttctgcttcgccggacacgaaacaggcagactgtctggcgctgccgatacacaggccctgctgagaaacgaccaagtgtatcagcccctgcgcgacagagatgatgcccagtattctcacctcggcggcaactgggctagaaacaagtctagaggatctggagcaacaaacttctcactactcaaacaagcaggtgacgtggaggagaatcccgggcctgggatccacatggaacaacggggacagaacgccccggccgcttcgggggcccggaaaaggcacggcccaggacccagggaggcgcggggagccaggcctgggccccgggtccccaagacccttgtgctcgttgtcgccgcggtcctgctgttggtctcagctgagtctgctctgatcacccaacaagacctagctccccagcagagagcggccccacaacaaaagaggtccagcccctcagagggattgtgtccacctggacaccatatctcagaagacggtagagattgcatctcctgcaaatatggacaggactatagcactcactggaatgacctccttttctgcttgcgctgcaccaggtgtgattcaggtgaagtggagctaagtccctgcaccacgaccagaaacacagtgtgtcagtgcgaagaaggcaccttccgggaagaagattctcctgagatgtgccggaagtgccgcacagggtgtcccagagggatggtcaaggtcggtgattgtacaccctggagtgacatcgaatgtgtccacaaagaatcaggtacaaagcacagtggggaagtcccagctgtggaggagacggtgacctccagcccagggactcctgcctctccctgttctctctcaggcatcatcataggagtcacagttgcagccgtagtcttgattgtggctgtgtttgttcggagggaccagaggctgccccccgatgcccacaagccccctgggggaggcagtttccggacccccatccaagaggagcaggccgacgcccactccaccctggccaagatctga

SEQ ID NO: 2906 - DNA, 2163 bp, Artificial Sequence
  Synthetic Polynucleotide
atggccttaccagtgaccgccttgctcctgccgctggccttgctgctccacgccgccaggccggacatccagatgacacagactacatcctccctgtctgcctctctgggagacagagtcaccatcagttgcagggcaagtcaggacattagtaaatatttaaattggtatcagcagaaaccagatggaactgttaaactcctgatctaccatacatcaagattacactcaggagtcccatcaaggttcagtggcagtgggtctggaacagattattctctcaccattagcaacctggagcaagaagatattgccacttacttttgccaacagggtaatacgcttccgtacacgttcggaggggggaccaagctggagatcacaggtggcggtggctcgggcggtggtgggtcgggtggcggcggatctgaggtgaaactgcaggagtcaggacctggcctggtggcgccctcacagagcctgtccgtcacatgcactgtctcaggggtctcattacccgactatggtgtaagctggattcgccagcctccacgaaagggtctggagtggctgggagtaatatggggtagtgaaaccacatactataattcagctctcaaatccagactgaccatcatcaaggacaactccaagagccaagttttcttaaaaatgaacagtctgcaaactgatgacacagccatttactactgtgccaaacattattactacggtggtagctatgctatggactactggggtcaaggaacctcagtcaccgtctcctcacgcgtacagagcatcaagggcaaccacctggtcaaggtgtacgactaccaagaggacggcagcgtgctgctgacatgtgatgccgaggccaagaacatcacctggtttaaggacggcaagatgatcggcttcctgaccgaggacaagaagaagtggaacctgggcagcaacgctaaggaccccagaggcatgtatcagtgcaagggcagccagaacaagagcaagcccctccaggtgtactaccggatgtgccagaactgcatcgagctgaacgccgctaccatcagcggctttctgttcgccgagatcgtgtccatcttcgtgctggccgtgggcgtgtactttatcgctggacaggatggcgtgcggcagagcagagcttccgataagcaaaccctgctgcctaacgaccagctgtaccagcctctgaaggacagagaggacgaccagtacagccacctccagggcaatcagctgagaagaaactctagaggatctggagcaacaaacttctcactactcaaacaagcaggtgacgtggaggagaatcccgggcctgggatccacatggaacaacggggacagaacgccccggccgcttcgggggcccggaaaaggcacggcccaggacccagggaggcgcggggagccaggcctgggccccgggtccccaagacccttgtgctcgttgtcgccgcggtcctgctgttggtctcagctgagtctgctctgatcacccaacaagacctagctccccagcagagagcggccccacaacaaaagaggtccagcccctcagagggattgtgtccacctggacaccatatctcagaagacggtagagattgcatctcctgcaaatatggacaggactatagcactcactggaatgacctccttttctgcttgcgctgcaccaggtgtgattcaggtgaagtggagctaagtccctgcaccacgaccagaaacacagtgtgtcagtgcgaagaaggcaccttccgggaagaagattctcctgagatgtgccggaagtgccgcacagggtgtcccagagggatggtcaaggtcggtgattgtacaccctggagtgacatcgaatgtgtccacaaagaatcaggtacaaagcacagtggggaagtcccagctgtggaggagacggtgacctccagcccagggactcctgcctctccctgttctctctcaggcatcatcataggagtcacagttgcagccgtagtcttgattgtggctgtgtttgttcggagggaccagaggctgccccccgatgcccacaagccccctgggggaggcagtttccggacccccatccaagaggagcaggccgacgcccactccaccctggccaagatctga

SEQ ID NO: 2907 - DNA, 2112 bp, Artificial Sequence
  Synthetic Polynucleotide
atggccttaccagtgaccgccttgctcctgccgctggccttgctgctccacgccgccaggccggacatccagatgacacagactacatcctccctgtctgcctctctgggagacagagtcaccatcagttgcagggcaagtcaggacattagtaaatatttaaattggtatcagcagaaaccagatggaactgttaaactcctgatctaccatacatcaagattacactcaggagtcccatcaaggttcagtggcagtgggtctggaacagattattctctcaccattagcaacctggagcaagaagatattgccacttacttttgccaacagggtaatacgcttccgtacacgttcggaggggggaccaagctggagatcacaggtggcggtggctcgggcggtggtgggtcgggtggcggcggatctgaggtgaaactgcaggagtcaggacctggcctggtggcgccctcacagagcctgtccgtcacatgcactgtctcaggggtctcattacccgactatggtgtaagctggattcgccagcctccacgaaagggtctggagtggctgggagtaatatggggtagtgaaaccacatactataattcagctctcaaatccagactgaccatcatcaaggacaactccaagagccaagttttcttaaaaatgaacagtctgcaaactgatgacacagccatttactactgtgccaaacattattactacggtggtagctatgctatggactactggggtcaaggaacctcagtcaccgtctcctcacgcgtacagagttttgggttgttggaccctaaattgtgctatctgttggacggaatcctgttcatttacggagtgatcctgaccgcattgttcctgcgggttaagttttccagatccgcagacgcacccgcttaccaacaagggcagaaccaactctacaatgaacttaatttggggcggagggaagagtacgacgttctggacaaaaggaggggacgagatcccgagatgggcggaaagcctcagcgaaggaagaatccgcaagaggggctttataacgaactccagaaagataaaatggcagaagcctatagtgagattgggatgaagggagaaaggaggaggggtaaaggtcacgatgggttgtaccaaggattgagcacagccactaaagatacctatgatgcgctccacatgcaggccctgccgccaagatctagaggatctggagcaacaaacttctcactactcaaacaagcaggtgacgtggaggagaatcccgggcctgggatccacatggaacaacggggacagaacgccccggccgcttcgggggcccggaaaaggcacggcccaggacccagggaggcgcggggagccaggcctgggccccgggtccccaagacccttgtgctcgttgtcgccgcggtcctgctgttggtctcagctgagtctgctctgatcacccaacaagacctagctccccagcagagagcggccccacaacaaaagaggtccagcccctcagagggattgtgtccacctggacaccatatctcagaagacggtagagattgcatctcctgcaaatatggacaggactatagcactcactggaatgacctccttttctgcttgcgctgcaccaggtgtgattcaggtgaagtggagctaagtccctgcaccacgaccagaaacacagtgtgtcagtgcgaagaaggcaccttccgggaagaagattctcctgagatgtgccggaagtgccgcacagggtgtcccagagggatggtcaaggtcggtgattgtacaccctggagtgacatcgaatgtgtccacaaagaatcaggtacaaagcacagtggggaagtcccagctgtggaggagacggtgacctccagcccagggactcctgcctctccctgttctctctcaggcatcatcataggagtcacagttgcagccgtagtcttgattgtggctgtgtttgttcggagggaccagaggctgccccccgatgcccacaagccccctgggggaggcagtttccggacccccatccaagaggagcaggccgacgcccactccaccctggccaagatctga

SEQ ID NO: 2908 - DNA, 2778 bp, Artificial Sequence
  Synthetic Polynucleotide
atggccttaccagtgaccgccttgctcctgccgctggccttgctgctccacgccgccaggccggacatccagatgacacagactacatcctccctgtctgcctctctgggagacagagtcaccatcagttgcagggcaagtcaggacattagtaagtacctgaactggtatcagcagaaaccagatggaactgttaaactcctgatctaccatacatcaagattacactcaggagtcccatcaaggttcagtggcagtgggtctggaacagattattctctcaccattagcaacctggagcaagaagatattgccacttacttttgccaacagggtaatacgcttccgtacacgttcggaggggggaccaagctggagatcacactcgagggacagcctaaggccaatcctaccgtgacactgttccctccaagcagcgaagaactccaggccaacaaggccacacttgtgtgcctgatctccgacttctaccctggggctgtgacagtggcttggaaggccgatggatctcctgtgaaagccggcgtggaaaccaccaagccatccaagcagagcaacaacaaatacgccgccagctcctacctgagcctgacacctgagcagtggaagtcccacagatcctacagctgccaagtgacccacgaaggcagcaccgtggaaaagacagtggcccctacagagtgcagcggcagagccgattgcggcatcaccagcgccagctaccaccagggcgtgctgagcgccaccatcctgtacgagatcctgctgggcaaggccaccctgtacgccgtgctggtgtctgccctggtgctgatggctatggtcaagcggaaggacagccggggaagggccaagcgatctggatctggagcaacaaacttctcactactcaaacaagcaggtgacgtggaggagaatcccgggcctactagtatggactggatttggcgcatccttttccttgtcggcgctgctaccggcgcgcattccttcgaagtgaaactgcaggagtcaggacctggcctggtggcgccctcacagagcctgtccgtcacatgcactgtctcaggggtctcattacccgactatggtgtaagctggattcgccagcctccacgaaagggtctggagtggctgggagtaatatggggtagtgaaaccacatactataattcagctctcaaatccagactgaccatcatcaaggacaactccaagagccaagttttcttaaaaatgaacagtctgcaaactgatgacacagccatttactactgtgccaaacattattactacggtggtagctatgctatggactactggggccaaggaacctcagtcaccgtctcctcaacgcgtgcctctacaaagggaccctccgtgtttcctctggctcccagcagcaagtctacaagcggaggaacagccgctctgggctgcctggtcaaggattactttcccgagcctgtgaccgtgtcctggaatagcggagcactgacaagcggcgtgcacacctttccagccgtgctgcaaagcagcggcctgtactctctgagcagcgtggtcacagtgcctagctctagcctgggcacccagacctacatctgcaatgtgaaccacaagcctagcaacaccaaggtggacaagagagtggaacccaagagctgtatccccgaggacacattcttcccaagcagcgacgtgccctgcgacgtgaagctggtggaaaagagcttcgagacagacaccaacctgaacttccagaacctgagcgtgatcggcttcagaatcctgctgctgaaagtggccggctttaacctgctgatgaccctgcggctgtggtccagccgcgccaagagaagcggatctggcgtgaagcagaccctgaatttcgacctgctgaagctggctggcgacgtggaatccaacccaggcccttctagaggccatatggaacaacggggacagaacgccccggccgcttcgggggcccggaaaaggcacggcccaggacccagggaggcgcggggagccaggcctgggccccgggtccccaagacccttgtgctcgttgtcgccgcggtcctgctgttggtctcagctgagtctgctctgatcacccaacaagacctagctccccagcagagagcggccccacaacaaaagaggtccagcccctcagagggattgtgtccacctggacaccatatctcagaagacggtagagattgcatctcctgcaaatatggacaggactatagcactcactggaatgacctccttttctgcttgcgctgcaccaggtgtgattcaggtgaagtggagctaagtccctgcaccacgaccagaaacacagtgtgtcagtgcgaagaaggcaccttccgggaagaagattctcctgagatgtgccggaagtgccgcacagggtgtcccagagggatggtcaaggtcggtgattgtacaccctggagtgacatcgaatgtgtccacaaagaatcaggtacaaagcacagtggggaagtcccagctgtggaggagacggtgacctccagcccagggactcctgcctctccctgttctctctcaggcatcatcataggagtcacagttgcagccgtagtcttgattgtggctgtgtttgttcggagggaccagaggctgccccccgatgcccacaagccccctgggggaggcagtttccggacccccatccaagaggagcaggccgacgcccactccaccctggccaagatctga

SEQ ID NO: 2909 - DNA, 2844 bp, Artificial Sequence
  Synthetic Polynucleotide
atggccttaccagtgaccgccttgctcctgccgctggccttgctgctccacgccgccaggccggacatccagatgacacagactacatcctccctgtctgcctctctgggagacagagtcaccatcagttgcagggcaagtcaggacattagtaagtacctgaactggtatcagcagaaaccagatggaactgttaaactcctgatctaccatacatcaagattacactcaggagtcccatcaaggttcagtggcagtgggtctggaacagattattctctcaccattagcaacctggagcaagaagatattgccacttacttttgccaacagggtaatacgcttccgtacacgttcggaggggggaccaagctggagatcacactcgagggacagcctaaggccaatcctaccgtgacactgttccctccaagcagcgaagaactccaggccaacaaggccacacttgtgtgcctgatctccgacttctaccctggggctgtgacagtggcttggaaggccgatggatctcctgtgaaagccggcgtggaaaccaccaagccatccaagcagagcaacaacaaatacgccgccagctcctacctgagcctgacacctgagcagtggaagtcccacagatcctacagctgccaagtgacccacgaaggcagcaccgtggaaaagacagtggcccctacagagtgcagccccatcaagaccgatgtgattacaatggaccccaaggacaactgctccaaggacgccaacgataccctgctgctccagctgaccaacaccagcgcctactacatgtacttgttgctgctgctgaagtccgtggtgtacttcgccatcatcacatgctgcctgctgcggagaaccgccttctgctgcaacggcgagaagtctagggccaagcgatctggatctggagcaacaaacttctcactactcaaacaagcaggtgacgtggaggagaatcccgggcctactagtatggactggatttggcgcatccttttccttgtcggcgctgctaccggcgcgcattccttcgaagtgaaactgcaggagtcaggacctggcctggtggcgccctcacagagcctgtccgtcacatgcactgtctcaggggtctcattacccgactatggtgtaagctggattcgccagcctccacgaaagggtctggagtggctgggagtaatatggggtagtgaaaccacatactataattcagctctcaaatccagactgaccatcatcaaggacaactccaagagccaagttttcttaaaaatgaacagtctgcaaactgatgacacagccatttactactgtgccaaacattattactacggtggtagctatgctatggactactggggccaaggaacctcagtcaccgtctcctcaacgcgtgcctctacaaagggaccctccgtgtttcctctggctcccagcagcaagtctacaagcggaggaacagccgctctgggctgcctggtcaaggattactttcccgagcctgtgaccgtgtcctggaatagcggagcactgacaagcggcgtgcacacctttccagccgtgctgcaaagcagcggcctgtactctctgagcagcgtggtcacagtgcctagctctagcctgggcacccagacctacatctgcaatgtgaaccacaagcctagcaacaccaaggtggacaagagagtggaacccaagagctgtgaagtgaaaaccgactccaccgaccacgtgaagcccaaagagacagagaacaccaagcagcccagcaagagctgccacaagcccaaggccatcgtgcacaccgagaaagtgaacatgatgagcctgaccgtgctgggcctgcggatgctgttcgccaaaaccgtggccgtgaacttcctgctgaccgccaagctgttcttcctccgcgccaagagaagcggatctggcgtgaagcagaccctgaatttcgacctgctgaagctggctggcgacgtggaatccaacccaggcccttctagaggccatatggaacaacggggacagaacgccccggccgcttcgggggcccggaaaaggcacggcccaggacccagggaggcgcggggagccaggcctgggccccgggtccccaagacccttgtgctcgttgtcgccgcggtcctgctgttggtctcagctgagtctgctctgatcacccaacaagacctagctccccagcagagagcggccccacaacaaaagaggtccagcccctcagagggattgtgtccacctggacaccatatctcagaagacggtagagattgcatctcctgcaaatatggacaggactatagcactcactggaatgacctccttttctgcttgcgctgcaccaggtgtgattcaggtgaagtggagctaagtccctgcaccacgaccagaaacacagtgtgtcagtgcgaagaaggcaccttccgggaagaagattctcctgagatgtgccggaagtgccgcacagggtgtcccagagggatggtcaaggtcggtgattgtacaccctggagtgacatcgaatgtgtccacaaagaatcaggtacaaagcacagtggggaagtcccagctgtggaggagacggtgacctccagcccagggactcctgcctctccctgttctctctcaggcatcatcataggagtcacagttgcagccgtagtcttgattgtggctgtgtttgttcggagggaccagaggctgccccccgatgcccacaagccccctgggggaggcagtttccggacccccatccaagaggagcaggccgacgcccactccaccctggccaagatctga

SEQ ID NO: 2910 - DNA, 2745 bp, Artificial Sequence
  Synthetic Polynucleotide
atggccttaccagtgaccgccttgctcctgccgctggccttgctgctccacgccgccaggccgaatgctggcgtgacccagacacctaagttccaggtgctgaaaaccggccagagcatgaccctgcaatgcgcccaggacatgaaccatgagtacatgagctggtacagacaggaccccggcatgggcctgagactgatccactactctgtggctatccagaccaccgaccagggcgaagtgcccaatggctacaacgtgtccagaagcaccatcgaggacttcccactgagactgctgtctgccgctcctagccagaccagcgtgtacttttgtgccagcagctacctgggcaacaccggcgagctgttttttggcgagggcagcagactgaccgtggaggacctgaagaacgtgttcccacctgaggtggccgtgttcgagcctagcaaggccgagatcgcccacacccagaaagccaccctcgtgtgcctggctaccggcttctaccccgaccatgtggaactgtcttggtgggtcaacggcaaagaggtgcacagcggcgtgtgtaccgacccccagccactgaaagaacagcccgccctgaacgacagccggtactgcctgagcagcagactgagagtgtccgccaccttctggcagaacccccggaaccacttcagatgccaggtgcagttctacggcctgagcgagaacgacgagtggacccaggacagagccaagcccgtgacccagatcgtgtctgccgaagcctggggcagagccgattgcggcatcaccagcgccagctaccaccagggcgtgctgagcgccaccatcctgtacgagatcctgctgggcaaggccaccctgtacgccgtgctggtgtctgccctggtgctgatggctatggtcaagcggaaggacagccggggaagggccaagcgatctggatctggagcaacaaacttctcactactcaaacaagcaggtgacgtggaggagaatcccgggcctactagtatggactggatttggcgcatccttttccttgtcggcgctgctaccggcgcgcattccaatgctggcgtgacccagacacctaagttccaggtgctgaaaaccggccagagcatgaccctgcaatgcgcccaggacatgaaccatgagtacatgagctggtacagacaggaccccggcatgggcctgagactgatccactactctgtggctatccagaccaccgaccagggcgaagtgcccaatggctacaacgtgtccagaagcaccatcgaggacttcccactgagactgctgtctgccgctcctagccagaccagcgtgtacttttgtgccagcagctacctgggcaacaccggcgagctgttttttggcgagggcagcagactgaccgtgatccagaaccctgatcctgccgtgtaccagctgcgggatagcaagagcagcgacaagagcgtgtgtctgttcaccgacttcgacagccagaccaacgtgtcccagagcaaggactccgacgtgtacatcaccgataagtgcgtgctggacatgcggagcatggacttcaagagcaactccgccgtggcctggtccaacaagtccgatttcgcctgcgccaacgccttcaacaacagcattatccccgaggacacattcttcccaagcagcgacgtgccctgcgacgtgaagctggtggaaaagagcttcgagacagacaccaacctgaacttccagaacctgagcgtgatcggcttcagaatcctgctgctgaaagtggccggctttaacctgctgatgaccctgcggctgtggtccagccgcgccaagagaagcggatctggcgtgaagcagaccctgaatttcgacctgctgaagctggctggcgacgtggaatccaacccaggcccttctagaggccatatggaacaacggggacagaacgccccggccgcttcgggggcccggaaaaggcacggcccaggacccagggaggcgcggggagccaggcctgggccccgggtccccaagacccttgtgctcgttgtcgccgcggtcctgctgttggtctcagctgagtctgctctgatcacccaacaagacctagctccccagcagagagcggccccacaacaaaagaggtccagcccctcagagggattgtgtccacctggacaccatatctcagaagacggtagagattgcatctcctgcaaatatggacaggactatagcactcactggaatgacctccttttctgcttgcgctgcaccaggtgtgattcaggtgaagtggagctaagtccctgcaccacgaccagaaacacagtgtgtcagtgcgaagaaggcaccttccgggaagaagattctcctgagatgtgccggaagtgccgcacagggtgtcccagagggatggtcaaggtcggtgattgtacaccctggagtgacatcgaatgtgtccacaaagaatcaggtacaaagcacagtggggaagtcccagctgtggaggagacggtgacctccagcccagggactcctgcctctccctgttctctctcaggcatcatcataggagtcacagttgcagccgtagtcttgattgtggctgtgtttgttcggagggaccagaggctgccccccgatgcccacaagccccctgggggaggcagtttccggacccccatccaagaggagcaggccgacgcccactccaccctggccaagatctga

SEQ ID NO: 2911 - DNA, 2757 bp, Artificial Sequence
  Synthetic Polynucleotide
atgctcctgctgctcgtcccagtgctcgaggtgatttttaccctgggaggaaccagagcccagtcggtgacccagcttggcagccacgtctctgtctctgagggagccctggttctgctgaggtgcaactactcatcgtctgttccaccatatctcttctggtatgtgcaataccccaaccaaggactccagcttctcctgaagcacacaacaggggccaccctggttaaaggcatcaacggttttgaggctgaatttaagaagagtgaaacctccttccacctgacgaaaccctcagcccatatgagcgacgcggctgagtacttctgtgctgtgagtgattctagggctgcaggcaacaagctaacttttggaggaggaaccagggtgctagttaaaccaaatatccagaaccctgaccctgccgtgtaccagctgagagactctaaatccagtgacaagtctgtctgcctattcaccgattttgattctcaaacaaatgtgtcacaaagtaaggattctgatgtgtatatcacagacaaaactgtgctagacatgaggtctatggacttcaagagcaacagtgctgtggcctggagcaacaaatctgactttgcatgtgcaaacgccttcaacaacagcattattccagaagacaccttcttccccagcccagaaagttcctgtgatgtcaagctggtcgagaaaagctttgaaacagatacgaacctaaactttcaaaacctgtcagtgattgggttccgaatcctcctcctgaaagtggccgggtttaatctgctcatgacgctgcggctgtggtccagcagggccaagcgatctggatctggagcaacaaacttctcactactcaaacaagcaggtgacgtggaggagaatcccgggcctactagtatgggaatcaggctcctctgtcgtgtggccttttgtttcctggctgtaggcctcgtagatgtgaaagtaacccagagctcgagatatctagtcaaaaggacgggagagaaagtttttctggaatgtgtccaggatatggaccatgaaaatatgttctggtatcgacaagacccaggtctggggctacggctgatctatttctcatatgatgttaaaatgaaagaaaaaggagatattcctgaggggtacagtgtctctagagagaagaaggagcgcttctccctgattctggagtccgccagcaccaaccagacatctatgtacctctgtgccagcagattccccgggacagcctataattcacccctccactttgggaatgggaccaggctcactgtgacagaggacctgaacaaggtgttcccacccgaggtcgctgtgtttgagccatcagaagcagagatctcccacacccaaaaggccacactggtgtgcctggccacaggcttcttccctgaccacgtggagctgagctggtgggtgaatgggaaggaggtgcacagtggggtcagcacggacccgcagcccctcaaggagcagcccgccctcaatgactccagatactgcctgagcagccgcctgagggtctcggccaccttctggcagaacccccgcaaccacttccgctgtcaagtccagttctacgggctctcggagaatgacgagtggacccaggatagggccaaacccgtcacccagatcgtcagcgccgaggcctggggtagagcagactgtggctttacctcggtgtcctaccagcaaggggtcctgtctgccaccatcctctatgagatcctgctagggaaggccaccctgtatgctgtgctggtcagcgcccttgtgttgatggccatggtcaagagaaaggatttctgacgcgccaagagaagcggatctggcgtgaagcagaccctgaatttcgacctgctgaagctggctggcgacgtggaatccaacccaggcccttctagaggccatatggaacaacggggacagaacgccccggccgcttcgggggcccggaaaaggcacggcccaggacccagggaggcgcggggagccaggcctgggccccgggtccccaagacccttgtgctcgttgtcgccgcggtcctgctgttggtctcagctgagtctgctctgatcacccaacaagacctagctccccagcagagagcggccccacaacaaaagaggtccagcccctcagagggattgtgtccacctggacaccatatctcagaagacggtagagattgcatctcctgcaaatatggacaggactatagcactcactggaatgacctccttttctgcttgcgctgcaccaggtgtgattcaggtgaagtggagctaagtccctgcaccacgaccagaaacacagtgtgtcagtgcgaagaaggcaccttccgggaagaagattctcctgagatgtgccggaagtgccgcacagggtgtcccagagggatggtcaaggtcggtgattgtacaccctggagtgacatcgaatgtgtccacaaagaatcaggtacaaagcacagtggggaagtcccagctgtggaggagacggtgacctccagcccagggactcctgcctctccctgttctctctcaggcatcatcataggagtcacagttgcagccgtagtcttgattgtggctgtgtttgttcggagggaccagaggctgccccccgatgcccacaagccccctgggggaggcagtttccggacccccatccaagaggagcaggccgacgcccactccaccctggccaagatctga

SEQ ID NO: 2912 - DNA, 23 bp, Artificial Sequence
  Synthetic Polynucleotide
  misc_feature (1)..(23): n is a, c, g, or t
nnnnnnnnnnnnnnnnnnnnnnn

SEQ ID NO: 2913 - DNA, 2445 bp, Artificial Sequence
  Synthetic Polynucleotide
atggccttaccagtgaccgccttgctcctgccgctggccttgctgctccacgccgccaggccggacatccagatgacacagactacatcctccctgtctgcctctctgggagacagagtcaccatcagttgcagggcaagtcaggacattagtaaatatttaaattggtatcagcagaaaccagatggaactgttaaactcctgatctaccatacatcaagattacactcaggagtcccatcaaggttcagtggcagtgggtctggaacagattattctctcaccattagcaacctggagcaagaagatattgccacttacttttgccaacagggtaatacgcttccgtacacgttcggaggggggaccaagctggagatcacaggtggcggtggctcgggcggtggtgggtcgggtggcggcggatctgaggtgaaactgcaggagtcaggacctggcctggtggcgccctcacagagcctgtccgtcacatgcactgtctcaggggtctcattacccgactatggtgtaagctggattcgccagcctccacgaaagggtctggagtggctgggagtaatatggggtagtgaaaccacatactataattcagctctcaaatccagactgaccatcatcaaggacaactccaagagccaagttttcttaaaaatgaacagtctgcaaactgatgacacagccatttactactgtgccaaacattattactacggtggtagctatgctatggactactggggtcaaggaacctcagtcaccgtctcctcacgcgtagagcagaaactgatctcggaagaggatctggcgaagcccaccacgacgccagcgccgcgaccaccaacaccggcgcccaccatcgcgtcgcagcccctgtccctgcgcccagaggcgtgccggccagcggcggggggcgcagtgcacacgagggggctggacttcgcctgtgacatctacatctgggcgcccttggccgggacttgtggggtccttctcctgtcactggttatcaccctttactgcaaacggggcagaaagaaactcctgtatatattcaaacaaccatttatgagaccagtacaaactactcaagaggaagatggctgtagctgccgatttccagaagaagaagaaggaggatgtgaactgagagtgaagttcagcaggagcgcagacgcccccgcgtaccagcagggccagaaccagctctataacgagctgaatctaggacgaagagaggagtacgatgttttggacaagagacgtggccgggaccctgagatggggggaaagccgagaaggaagaaccctcaggaaggcctgtacaatgaactgcagaaagataagatggcggaggcctacagtgagattgggatgaaaggcgagcgccggaggggcaaggggcacgatggcctttaccagggtctcagtacagccaccaaggacacctacgacgcccttcacatgcaggccctgccccctcgctctagtggctccggcgagggcagaggaagtctactaacctgcggagatgtggaagaaaatcctggcccacatatggaacaacggggacagaacgccccggccgcttcgggggcccggaaaaggcacggcccaggacccagggaggcgcggggagccaggcctgggccccgggtccccaagacccttgtgctcgttgtcgccgcggtcctgctgttggtctcagctgagtctgctctgatcacccaacaagacctagctccccagcagagagcggccccacaacaaaagaggtccagcccctcagagggattgtgtccacctggacaccatatctcagaagacggtagagattgcatctcctgcaaatatggacaggactatagcactcactggaatgacctccttttctgcttgcgctgcaccaggtgtgattcaggtgaagtggagctaagtccctgcaccacgaccagaaacacagtgtgtcagtgcgaagaaggcaccttccgggaagaagattctcctgagatgtgccggaagtgccgcacagggtgtcccagagggatggtcaaggtcggtgattgtacaccctggagtgacatcgaatgtgtccacaaagaatcaggtacaaagcacagtggggaagtcccagctgtggaggagacggtgacctccagcccagggactcctgcctctccctgttctctctcaggcatcatcataggagtcacagttgcagccgtagtcttgattgtggctgtgtttgttcagcttggactgcacatctggcagctgaggagtcagtgcatgtggccccgagagacccagctgctgctggaggtgccgccgtcgaccgaagacgccagaagctgccagttccccgaggaagagcggggcgagcgatcggcagaggagaaggggcggctgggagacctgtgggtgtga

SEQ ID NO: 2914 - DNA, 2919 bp, Artificial Sequence
  Synthetic Polynucleotide
atggccttaccagtgaccgccttgctcctgccgctggccttgctgctccacgccgccaggccggacatccagatgacacagactacatcctccctgtctgcctctctgggagacagagtcaccatcagttgcagggcaagtcaggacattagtaagtacctgaactggtatcagcagaaaccagatggaactgttaaactcctgatctaccatacatcaagattacactcaggagtcccatcaaggttcagtggcagtgggtctggaacagattattctctcaccattagcaacctggagcaagaagatattgccacttacttttgccaacagggtaatacgcttccgtacacgttcggaggggggaccaagctggagatcacactcgaggggaaaccaattcccaaccctcttctgggactggattcaaccggcagcggcgaggacctgaagaacgtgttcccacctgaggtggccgtgttcgagcctagcaaggccgagatcgcccacacccagaaagccaccctcgtgtgcctggctaccggcttctaccccgaccatgtggaactgtcttggtgggtcaacggcaaagaggtgcacagcggcgtgtgtaccgacccccagccactgaaagaacagcccgccctgaacgacagccggtactgcctgagcagcagactgagagtgtccgccaccttctggcagaacccccggaaccacttcagatgccaggtgcagttctacggcctgagcgagaacgacgagtggacccaggacagagccaagcccgtgacccagatcgtgtctgccgaagcctggggcagagccgattgcggcatcaccagcgccagctaccaccagggcgtgctgagcgccaccatcctgtacgagatcctgctgggcaaggccaccctgtacgccgtgctggtgtctgccctggtgctgatggctatggtcaagcggaaggacagccggggaagggccaagcgatctggatctggagcaacaaacttctcactactcaaacaagcaggtgacgtggaggagaatcccgggcctactagtatggactggatttggcgcatccttttccttgtcggcgctgctaccggcgcgcattccttcgaagtgaaactgcaggagtcaggacctggcctggtggcgccctcacagagcctgtccgtcacatgcactgtctcaggggtctcattacccgactatggtgtaagctggattcgccagcctccacgaaagggtctggagtggctgggagtaatatggggtagtgaaaccacatactataattcagctctcaaatccagactgaccatcatcaaggacaactccaagagccaagttttcttaaaaatgaacagtctgcaaactgatgacacagccatttactactgtgccaaacattattactacggtggtagctatgctatggactactggggccaaggaacctcagtcaccgtctcctcaacgcgtgagcagaaactgatctcggaagaggatgggagcggcatccagaaccctgatcctgccgtgtaccagctgcgggatagcaagagcagcgacaagagcgtgtgtctgttcaccgacttcgacagccagaccaacgtgtcccagagcaaggactccgacgtgtacatcaccgataagtgcgtgctggacatgcggagcatggacttcaagagcaactccgccgtggcctggtccaacaagtccgatttcgcctgcgccaacgccttcaacaacagcattatccccgaggacacattcttcccaagcagcgacgtgccctgcgacgtgaagctggtggaaaagagcttcgagacagacaccaacctgaacttccagaacctgagcgtgatcggcttcagaatcctgctgctgaaagtggccggctttaacctgctgatgaccctgcggctgtggtccagccgcgccaagagaagcggatctggcgtgaagcagaccctgaatttcgacctgctgaagctggctggcgacgtggaatccaacccaggcccttctagaggccatatggaacaacggggacagaacgccccggccgcttcgggggcccggaaaaggcacggcccaggacccagggaggcgcggggagccaggcctgggccccgggtccccaagacccttgtgctcgttgtcgccgcggtcctgctgttggtctcagctgagtctgctctgatcacccaacaagacctagctccccagcagagagcggccccacaacaaaagaggtccagcccctcagagggattgtgtccacctggacaccatatctcagaagacggtagagattgcatctcctgcaaatatggacaggactatagcactcactggaatgacctccttttctgcttgcgctgcaccaggtgtgattcaggtgaagtggagctaagtccctgcaccacgaccagaaacacagtgtgtcagtgcgaagaaggcaccttccgggaagaagattctcctgagatgtgccggaagtgccgcacagggtgtcccagagggatggtcaaggtcggtgattgtacaccctggagtgacatcgaatgtgtccacaaagaatcaggtacaaagcacagtggggaagtcccagctgtggaggagacggtgacctccagcccagggactcctgcctctccctgttctctctcaggcatcatcataggagtcacagttgcagccgtagtcttgattgtggctgtgtttgttcagcttggactgcacatctggcagctgaggagtcagtgcatgtggccccgagagacccagctgctgctggaggtgccgccgtcgaccgaagacgccagaagctgccagttccccgaggaagagcggggcgagcgatcggcagaggagaaggggcggctgggagacctgtgggtgtga

SEQ ID NO: 2915 - DNA, 2337 bp, Artificial Sequence
  Synthetic Polynucleotide
atggccttaccagtgaccgccttgctcctgccgctggccttgctgctccacgccgccaggccggacatccagatgacacagactacatcctccctgtctgcctctctgggagacagagtcaccatcagttgcagggcaagtcaggacattagtaaatatttaaattggtatcagcagaaaccagatggaactgttaaactcctgatctaccatacatcaagattacactcaggagtcccatcaaggttcagtggcagtgggtctggaacagattattctctcaccattagcaacctggagcaagaagatattgccacttacttttgccaacagggtaatacgcttccgtacacgttcggaggggggaccaagctggagatcacaggtggcggtggctcgggcggtggtgggtcgggtggcggcggatctgaggtgaaactgcaggagtcaggacctggcctggtggcgccctcacagagcctgtccgtcacatgcactgtctcaggggtctcattacccgactatggtgtaagctggattcgccagcctccacgaaagggtctggagtggctgggagtaatatggggtagtgaaaccacatactataattcagctctcaaatccagactgaccatcatcaaggacaactccaagagccaagttttcttaaaaatgaacagtctgcaaactgatgacacagccatttactactgtgccaaacattattactacggtggtagctatgctatggactactggggtcaaggaacctcagtcaccgtctcctcacgcgtagagcagaaactgatctcggaagaggatctggcgaagcccaccacgacgccagcgccgcgaccaccaacaccggcgcccaccatcgcgtcgcagcccctgtccctgcgcccagaggcgtgccggccagcggcggggggcgcagtgcacacgagggggctggacttcgcctgtgacatctacatctgggcgcccttggccgggacttgtggggtccttctcctgtcactggttatcaccctttactgcgggcgcgccagagtgaagttcagcaggagcgcagacgcccccgcgtaccagcagggccagaaccagctctataacgagctgaatctaggacgaagagaggagtacgatgttttggacaagagacgtggccgggaccctgagatggggggaaagccgagaaggaagaaccctcaggaaggcctgtacaatgaactgcagaaagataagatggcggaggcctacagtgagattgggatgaaaggcgagcgccggaggggcaaggggcacgatggcctttaccagggtctcagtacagccaccaaggacacctacgacgcccttcacatgcaggccctgccccctcgctctagaggatctggagcaacaaacttctcactactcaaacaagcaggtgacgtggaggagaatcccgggcctgggatccacatggaacaacggggacagaacgccccggccgcttcgggggcccggaaaaggcacggcccaggacccagggaggcgcggggagccaggcctgggccccgggtccccaagacccttgtgctcgttgtcgccgcggtcctgctgttggtctcagctgagtctgctctgatcacccaacaagacctagctccccagcagagagcggccccacaacaaaagaggtccagcccctcagagggattgtgtccacctggacaccatatctcagaagacggtagagattgcatctcctgcaaatatggacaggactatagcactcactggaatgacctccttttctgcttgcgctgcaccaggtgtgattcaggtgaagtggagctaagtccctgcaccacgaccagaaacacagtgtgtcagtgcgaagaaggcaccttccgggaagaagattctcctgagatgtgccggaagtgccgcacagggtgtcccagagggatggtcaaggtcggtgattgtacaccctggagtgacatcgaatgtgtccacaaagaatcaggtacaaagcacagtggggaagtcccagctgtggaggagacggtgacctccagcccagggactcctgcctctccctgttctctctcaggcatcatcataggagtcacagttgcagccgtagtcttgattgtggctgtgtttgttcagcttggactgcacatctggcagctgaggagtcagtgcatgtggccccgagagacccagctgctgctggaggtgccgccgtcgaccgaagacgccagaagctgccagttccccgaggaagagcggggcgagcgatcggcagaggagaaggggcggctgggagacctgtgggtgtga

SEQ ID NO: 2916 - DNA, 2301 bp, Artificial Sequence
  Synthetic Polynucleotide
atggccttaccagtgaccgccttgctcctgccgctggccttgctgctccacgccgccaggccggacatccagatgacacagactacatcctccctgtctgcctctctgggagacagagtcaccatcagttgcagggcaagtcaggacattagtaaatatttaaattggtatcagcagaaaccagatggaactgttaaactcctgatctaccatacatcaagattacactcaggagtcccatcaaggttcagtggcagtgggtctggaacagattattctctcaccattagcaacctggagcaagaagatattgccacttacttttgccaacagggtaatacgcttccgtacacgttcggaggggggaccaagctggagatcacaggtggcggtggctcgggcggtggtgggtcgggtggcggcggatctgaggtgaaactgcaggagtcaggacctggcctggtggcgccctcacagagcctgtccgtcacatgcactgtctcaggggtctcattacccgactatggtgtaagctggattcgccagcctccacgaaagggtctggagtggctgggagtaatatggggtagtgaaaccacatactataattcagctctcaaatccagactgaccatcatcaaggacaactccaagagccaagttttcttaaaaatgaacagtctgcaaactgatgacacagccatttactactgtgccaaacattattactacggtggtagctatgctatggactactggggtcaaggaacctcagtcaccgtctcctcacgcgtagacggtaacgaggagatgggaggaatcactcaaaccccttacaaagtctcaatttcaggaacaactgttatccttacatgtccccagtatcctggcagcgagatcctttggcagcataacgacaagaatatagggggagatgaagacgataagaatatcggatctgacgaggatcacttgagcctgaaagagttctccgagcttgaacaaagcggatattatgtgtgctatccgcgcgggtcaaagccggaagacgctaacttttacctttatctccgagccagagtgtgcgaaaattgcatggaaatggacgttatgtccgttgctacaatagttatcgtagatatatgcatcacgggtggactgcttctgctggtttattattggtccaagaatagaaaggccaaagctaaacccgtgaccagaggcgctggcgcaggcggaaggcaaaggggacaaaacaaagaacggccaccaccagtgccaaatccagattatgagcctattcggaaaggacagagggacctgtactctggcctgaatcagagaagaatctctagaggatctggagcaacaaacttctcactactcaaacaagcaggtgacgtggaggagaatcccgggcctgggatccacatggaacaacggggacagaacgccccggccgcttcgggggcccggaaaaggcacggcccaggacccagggaggcgcggggagccaggcctgggccccgggtccccaagacccttgtgctcgttgtcgccgcggtcctgctgttggtctcagctgagtctgctctgatcacccaacaagacctagctccccagcagagagcggccccacaacaaaagaggtccagcccctcagagggattgtgtccacctggacaccatatctcagaagacggtagagattgcatctcctgcaaatatggacaggactatagcactcactggaatgacctccttttctgcttgcgctgcaccaggtgtgattcaggtgaagtggagctaagtccctgcaccacgaccagaaacacagtgtgtcagtgcgaagaaggcaccttccgggaagaagattctcctgagatgtgccggaagtgccgcacagggtgtcccagagggatggtcaaggtcggtgattgtacaccctggagtgacatcgaatgtgtccacaaagaatcaggtacaaagcacagtggggaagtcccagctgtggaggagacggtgacctccagcccagggactcctgcctctccctgttctctctcaggcatcatcataggagtcacagttgcagccgtagtcttgattgtggctgtgtttgttcagcttggactgcacatctggcagctgaggagtcagtgcatgtggccccgagagacccagctgctgctggaggtgccgccgtcgaccgaagacgccagaagctgccagttccccgaggaagagcggggcgagcgatcggcagaggagaaggggcggctgggagacctgtgggtgtga

SEQ ID NO: 2917 - DNA, 2196 bp, Artificial Sequence
  Synthetic Polynucleotide
atggccttaccagtgaccgccttgctcctgccgctggccttgctgctccacgccgccaggccggacatccagatgacacagactacatcctccctgtctgcctctctgggagacagagtcaccatcagttgcagggcaagtcaggacattagtaaatatttaaattggtatcagcagaaaccagatggaactgttaaactcctgatctaccatacatcaagattacactcaggagtcccatcaaggttcagtggcagtgggtctggaacagattattctctcaccattagcaacctggagcaagaagatattgccacttacttttgccaacagggtaatacgcttccgtacacgttcggaggggggaccaagctggagatcacaggtggcggtggctcgggcggtggtgggtcgggtggcggcggatctgaggtgaaactgcaggagtcaggacctggcctggtggcgccctcacagagcctgtccgtcacatgcactgtctcaggggtctcattacccgactatggtgtaagctggattcgccagcctccacgaaagggtctggagtggctgggagtaatatggggtagtgaaaccacatactataattcagctctcaaatccagactgaccatcatcaaggacaactccaagagccaagttttcttaaaaatgaacagtctgcaaactgatgacacagccatttactactgtgccaaacattattactacggtggtagctatgctatggactactggggtcaaggaacctcagtcaccgtctcctcacgcgtattcaagatccccatcgaggaactggaagatcgggtgttcgtgaactgcaacacctctatcacctgggtggaaggcaccgtgggaacactgctgagcgacatcaccagactggacctcggcaagcggattctggaccctcggggcatctacagatgcaacggcaccgacatctacaaggacaaagaaagcaccgtgcaggtccactacagaatgtgccagtcctgcgtggaactggaccctgctacagtggccggcatcatcgtgaccgatgtgatcgctactctgctgctggctctgggagtgttctgcttcgccggacacgaaacaggcagactgtctggcgctgccgatacacaggccctgctgagaaacgaccaagtgtatcagcccctgcgcgacagagatgatgcccagtattctcacctcggcggcaactgggctagaaacaagtctagaggatctggagcaacaaacttctcactactcaaacaagcaggtgacgtggaggagaatcccgggcctgggatccacatggaacaacggggacagaacgccccggccgcttcgggggcccggaaaaggcacggcccaggacccagggaggcgcggggagccaggcctgggccccgggtccccaagacccttgtgctcgttgtcgccgcggtcctgctgttggtctcagctgagtctgctctgatcacccaacaagacctagctccccagcagagagcggccccacaacaaaagaggtccagcccctcagagggattgtgtccacctggacaccatatctcagaagacggtagagattgcatctcctgcaaatatggacaggactatagcactcactggaatgacctccttttctgcttgcgctgcaccaggtgtgattcaggtgaagtggagctaagtccctgcaccacgaccagaaacacagtgtgtcagtgcgaagaaggcaccttccgggaagaagattctcctgagatgtgccggaagtgccgcacagggtgtcccagagggatggtcaaggtcggtgattgtacaccctggagtgacatcgaatgtgtccacaaagaatcaggtacaaagcacagtggggaagtcccagctgtggaggagacggtgacctccagcccagggactcctgcctctccctgttctctctcaggcatcatcataggagtcacagttgcagccgtagtcttgattgtggctgtgtttgttcagcttggactgcacatctggcagctgaggagtcagtgcatgtggccccgagagacccagctgctgctggaggtgccgccgtcgaccgaagacgccagaagctgccagttccccgaggaagagcggggcgagcgatcggcagaggagaaggggcggctgggagacctgtgggtgtga

SEQ ID NO: 2918 - DNA, 2226 bp, Artificial Sequence
  Synthetic Polynucleotide
atggccttaccagtgaccgccttgctcctgccgctggccttgctgctccacgccgccaggccggacatccagatgacacagactacatcctccctgtctgcctctctgggagacagagtcaccatcagttgcagggcaagtcaggacattagtaaatatttaaattggtatcagcagaaaccagatggaactgttaaactcctgatctaccatacatcaagattacactcaggagtcccatcaaggttcagtggcagtgggtctggaacagattattctctcaccattagcaacctggagcaagaagatattgccacttacttttgccaacagggtaatacgcttccgtacacgttcggaggggggaccaagctggagatcacaggtggcggtggctcgggcggtggtgggtcgggtggcggcggatctgaggtgaaactgcaggagtcaggacctggcctggtggcgccctcacagagcctgtccgtcacatgcactgtctcaggggtctcattacccgactatggtgtaagctggattcgccagcctccacgaaagggtctggagtggctgggagtaatatggggtagtgaaaccacatactataattcagctctcaaatccagactgaccatcatcaaggacaactccaagagccaagttttcttaaaaatgaacagtctgcaaactgatgacacagccatttactactgtgccaaacattattactacggtggtagctatgctatggactactggggtcaaggaacctcagtcaccgtctcctcacgcgtacagagcatcaagggcaaccacctggtcaaggtgtacgactaccaagaggacggcagcgtgctgctgacatgtgatgccgaggccaagaacatcacctggtttaaggacggcaagatgatcggcttcctgaccgaggacaagaagaagtggaacctgggcagcaacgctaaggaccccagaggcatgtatcagtgcaagggcagccagaacaagagcaagcccctccaggtgtactaccggatgtgccagaactgcatcgagctgaacgccgctaccatcagcggctttctgttcgccgagatcgtgtccatcttcgtgctggccgtgggcgtgtactttatcgctggacaggatggcgtgcggcagagcagagcttccgataagcaaaccctgctgcctaacgaccagctgtaccagcctctgaaggacagagaggacgaccagtacagccacctccagggcaatcagctgagaagaaactctagaggatctggagcaacaaacttctcactactcaaacaagcaggtgacgtggaggagaatcccgggcctgggatccacatggaacaacggggacagaacgccccggccgcttcgggggcccggaaaaggcacggcccaggacccagggaggcgcggggagccaggcctgggccccgggtccccaagacccttgtgctcgttgtcgccgcggtcctgctgttggtctcagctgagtctgctctgatcacccaacaagacctagctccccagcagagagcggccccacaacaaaagaggtccagcccctcagagggattgtgtccacctggacaccatatctcagaagacggtagagattgcatctcctgcaaatatggacaggactatagcactcactggaatgacctccttttctgcttgcgctgcaccaggtgtgattcaggtgaagtggagctaagtccctgcaccacgaccagaaacacagtgtgtcagtgcgaagaaggcaccttccgggaagaagattctcctgagatgtgccggaagtgccgcacagggtgtcccagagggatggtcaaggtcggtgattgtacaccctggagtgacatcgaatgtgtccacaaagaatcaggtacaaagcacagtggggaagtcccagctgtggaggagacggtgacctccagcccagggactcctgcctctccctgttctctctcaggcatcatcataggagtcacagttgcagccgtagtcttgattgtggctgtgtttgttcagcttggactgcacatctggcagctgaggagtcagtgcatgtggccccgagagacccagctgctgctggaggtgccgccgtcgaccgaagacgccagaagctgccagttccccgaggaagagcggggcgagcgatcggcagaggagaaggggcggctgggagacctgtgggtgtga

SEQ ID NO: 2919 - DNA, 2175 bp, Artificial Sequence
  Synthetic Polynucleotide
atggccttaccagtgaccgccttgctcctgccgctggccttgctgctccacgccgccaggccggacatccagatgacacagactacatcctccctgtctgcctctctgggagacagagtcaccatcagttgcagggcaagtcaggacattagtaaatatttaaattggtatcagcagaaaccagatggaactgttaaactcctgatctaccatacatcaagattacactcaggagtcccatcaaggttcagtggcagtgggtctggaacagattattctctcaccattagcaacctggagcaagaagatattgccacttacttttgccaacagggtaatacgcttccgtacacgttcggaggggggaccaagctggagatcacaggtggcggtggctcgggcggtggtgggtcgggtggcggcggatctgaggtgaaactgcaggagtcaggacctggcctggtggcgccctcacagagcctgtccgtcacatgcactgtctcaggggtctcattacccgactatggtgtaagctggattcgccagcctccacgaaagggtctggagtggctgggagtaatatggggtagtgaaaccacatactataattcagctctcaaatccagactgaccatcatcaaggacaactccaagagccaagttttcttaaaaatgaacagtctgcaaactgatgacacagccatttactactgtgccaaacattattactacggtggtagctatgctatggactactggggtcaaggaacctcagtcaccgtctcctcacgcgtacagagttttgggttgttggaccctaaattgtgctatctgttggacggaatcctgttcatttacggagtgatcctgaccgcattgttcctgcgggttaagttttccagatccgcagacgcacccgcttaccaacaagggcagaaccaactctacaatgaacttaatttggggcggagggaagagtacgacgttctggacaaaaggaggggacgagatcccgagatgggcggaaagcctcagcgaaggaagaatccgcaagaggggctttataacgaactccagaaagataaaatggcagaagcctatagtgagattgggatgaagggagaaaggaggaggggtaaaggtcacgatgggttgtaccaaggattgagcacagccactaaagatacctatgatgcgctccacatgcaggccctgccgccaagatctagaggatctggagcaacaaacttctcactactcaaacaagcaggtgacgtggaggagaatcccgggcctgggatccacatggaacaacggggacagaacgccccggccgcttcgggggcccggaaaaggcacggcccaggacccagggaggcgcggggagccaggcctgggccccgggtccccaagacccttgtgctcgttgtcgccgcggtcctgctgttggtctcagctgagtctgctctgatcacccaacaagacctagctccccagcagagagcggccccacaacaaaagaggtccagcccctcagagggattgtgtccacctggacaccatatctcagaagacggtagagattgcatctcctgcaaatatggacaggactatagcactcactggaatgacctccttttctgcttgcgctgcaccaggtgtgattcaggtgaagtggagctaagtccctgcaccacgaccagaaacacagtgtgtcagtgcgaagaaggcaccttccgggaagaagattctcctgagatgtgccggaagtgccgcacagggtgtcccagagggatggtcaaggtcggtgattgtacaccctggagtgacatcgaatgtgtccacaaagaatcaggtacaaagcacagtggggaagtcccagctgtggaggagacggtgacctccagcccagggactcctgcctctccctgttctctctcaggcatcatcataggagtcacagttgcagccgtagtcttgattgtggctgtgtttgttcagcttggactgcacatctggcagctgaggagtcagtgcatgtggccccgagagacccagctgctgctggaggtgccgccgtcgaccgaagacgccagaagctgccagttccccgaggaagagcggggcgagcgatcggcagaggagaaggggcggctgggagacctgtgggtgtga

SEQ ID NO: 2920 - DNA, 2841 bp, Artificial Sequence
  Synthetic Polynucleotide
atggccttaccagtgaccgccttgctcctgccgctggccttgctgctccacgccgccaggccggacatccagatgacacagactacatcctccctgtctgcctctctgggagacagagtcaccatcagttgcagggcaagtcaggacattagtaagtacctgaactggtatcagcagaaaccagatggaactgttaaactcctgatctaccatacatcaagattacactcaggagtcccatcaaggttcagtggcagtgggtctggaacagattattctctcaccattagcaacctggagcaagaagatattgccacttacttttgccaacagggtaatacgcttccgtacacgttcggaggggggaccaagctggagatcacactcgagggacagcctaaggccaatcctaccgtgacactgttccctccaagcagcgaagaactccaggccaacaaggccacacttgtgtgcctgatctccgacttctaccctggggctgtgacagtggcttggaaggccgatggatctcctgtgaaagccggcgtggaaaccaccaagccatccaagcagagcaacaacaaatacgccgccagctcctacctgagcctgacacctgagcagtggaagtcccacagatcctacagctgccaagtgacccacgaaggcagcaccgtggaaaagacagtggcccctacagagtgcagcggcagagccgattgcggcatcaccagcgccagctaccaccagggcgtgctgagcgccaccatcctgtacgagatcctgctgggcaaggccaccctgtacgccgtgctggtgtctgccctggtgctgatggctatggtcaagcggaaggacagccggggaagggccaagcgatctggatctggagcaacaaacttctcactactcaaacaagcaggtgacgtggaggagaatcccgggcctactagtatggactggatttggcgcatccttttccttgtcggcgctgctaccggcgcgcattccttcgaagtgaaactgcaggagtcaggacctggcctggtggcgccctcacagagcctgtccgtcacatgcactgtctcaggggtctcattacccgactatggtgtaagctggattcgccagcctccacgaaagggtctggagtggctgggagtaatatggggtagtgaaaccacatactataattcagctctcaaatccagactgaccatcatcaaggacaactccaagagccaagttttcttaaaaatgaacagtctgcaaactgatgacacagccatttactactgtgccaaacattattactacggtggtagctatgctatggactactggggccaaggaacctcagtcaccgtctcctcaacgcgtgcctctacaaagggaccctccgtgtttcctctggctcccagcagcaagtctacaagcggaggaacagccgctctgggctgcctggtcaaggattactttcccgagcctgtgaccgtgtcctggaatagcggagcactgacaagcggcgtgcacacctttccagccgtgctgcaaagcagcggcctgtactctctgagcagcgtggtcacagtgcctagctctagcctgggcacccagacctacatctgcaatgtgaaccacaagcctagcaacaccaaggtggacaagagagtggaacccaagagctgtatccccgaggacacattcttcccaagcagcgacgtgccctgcgacgtgaagctggtggaaaagagcttcgagacagacaccaacctgaacttccagaacctgagcgtgatcggcttcagaatcctgctgctgaaagtggccggctttaacctgctgatgaccctgcggctgtggtccagccgcgccaagagaagcggatctggcgtgaagcagaccctgaatttcgacctgctgaagctggctggcgacgtggaatccaacccaggcccttctagaggccatatggaacaacggggacagaacgccccggccgcttcgggggcccggaaaaggcacggcccaggacccagggaggcgcggggagccaggcctgggccccgggtccccaagacccttgtgctcgttgtcgccgcggtcctgctgttggtctcagctgagtctgctctgatcacccaacaagacctagctccccagcagagagcggccccacaacaaaagaggtccagcccctcagagggattgtgtccacctggacaccatatctcagaagacggtagagattgcatctcctgcaaatatggacaggactatagcactcactggaatgacctccttttctgcttgcgctgcaccaggtgtgattcaggtgaagtggagctaagtccctgcaccacgaccagaaacacagtgtgtcagtgcgaagaaggcaccttccgggaagaagattctcctgagatgtgccggaagtgccgcacagggtgtcccagagggatggtcaaggtcggtgattgtacaccctggagtgacatcgaatgtgtccacaaagaatcaggtacaaagcacagtggggaagtcccagctgtggaggagacggtgacctccagcccagggactcctgcctctccctgttctctctcaggcatcatcataggagtcacagttgcagccgtagtcttgattgtggctgtgtttgttcagcttggactgcacatctggcagctgaggagtcagtgcatgtggccccgagagacccagctgctgctggaggtgccgccgtcgaccgaagacgccagaagctgccagttccccgaggaagagcggggcgagcgatcggcagaggagaaggggcggctgggagacctgtgggtgtga

SEQ ID NO: 2921 - DNA, 2907 bp, Artificial Sequence
  Synthetic Polynucleotide
atggccttaccagtgaccgccttgctcctgccgctggccttgctgctccacgccgccaggccggacatccagatgacacagactacatcctccctgtctgcctctctgggagacagagtcaccatcagttgcagggcaagtcaggacattagtaagtacctgaactggtatcagcagaaaccagatggaactgttaaactcctgatctaccatacatcaagattacactcaggagtcccatcaaggttcagtggcagtgggtctggaacagattattctctcaccattagcaacctggagcaagaagatattgccacttacttttgccaacagggtaatacgcttccgtacacgttcggaggggggaccaagctggagatcacactcgagggacagcctaaggccaatcctaccgtgacactgttccctccaagcagcgaagaactccaggccaacaaggccacacttgtgtgcctgatctccgacttctaccctggggctgtgacagtggcttggaaggccgatggatctcctgtgaaagccggcgtggaaaccaccaagccatccaagcagagcaacaacaaatacgccgccagctcctacctgagcctgacacctgagcagtggaagtcccacagatcctacagctgccaagtgacccacgaaggcagcaccgtggaaaagacagtggcccctacagagtgcagccccatcaagaccgatgtgattacaatggaccccaaggacaactgctccaaggacgccaacgataccctgctgctccagctgaccaacaccagcgcctactacatgtacttgttgctgctgctgaagtccgtggtgtacttcgccatcatcacatgctgcctgctgcggagaaccgccttctgctgcaacggcgagaagtctagggccaagcgatctggatctggagcaacaaacttctcactactcaaacaagcaggtgacgtggaggagaatcccgggcctactagtatggactggatttggcgcatccttttccttgtcggcgctgctaccggcgcgcattccttcgaagtgaaactgcaggagtcaggacctggcctggtggcgccctcacagagcctgtccgtcacatgcactgtctcaggggtctcattacccgactatggtgtaagctggattcgccagcctccacgaaagggtctggagtggctgggagtaatatggggtagtgaaaccacatactataattcagctctcaaatccagactgaccatcatcaaggacaactccaagagccaagttttcttaaaaatgaacagtctgcaaactgatgacacagccatttactactgtgccaaacattattactacggtggtagctatgctatggactactggggccaaggaacctcagtcaccgtctcctcaacgcgtgcctctacaaagggaccctccgtgtttcctctggctcccagcagcaagtctacaagcggaggaacagccgctctgggctgcctggtcaaggattactttcccgagcctgtgaccgtgtcctggaatagcggagcactgacaagcggcgtgcacacctttccagccgtgctgcaaagcagcggcctgtactctctgagcagcgtggtcacagtgcctagctctagcctgggcacccagacctacatctgcaatgtgaaccacaagcctagcaacaccaaggtggacaagagagtggaacccaagagctgtgaagtgaaaaccgactccaccgaccacgtgaagcccaaagagacagagaacaccaagcagcccagcaagagctgccacaagcccaaggccatcgtgcacaccgagaaagtgaacatgatgagcctgaccgtgctgggcctgcggatgctgttcgccaaaaccgtggccgtgaacttcctgctgaccgccaagctgttcttcctccgcgccaagagaagcggatctggcgtgaagcagaccctgaatttcgacctgctgaagctggctggcgacgtggaatccaacccaggcccttctagaggccatatggaacaacggggacagaacgccccggccgcttcgggggcccggaaaaggcacggcccaggacccagggaggcgcggggagccaggcctgggccccgggtccccaagacccttgtgctcgttgtcgccgcggtcctgctgttggtctcagctgagtctgctctgatcacccaacaagacctagctccccagcagagagcggccccacaacaaaagaggtccagcccctcagagggattgtgtccacctggacaccatatctcagaagacggtagagattgcatctcctgcaaatatggacaggactatagcactcactggaatgacctccttttctgcttgcgctgcaccaggtgtgattcaggtgaagtggagctaagtccctgcaccacgaccagaaacacagtgtgtcagtgcgaagaaggcaccttccgggaagaagattctcctgagatgtgccggaagtgccgcacagggtgtcccagagggatggtcaaggtcggtgattgtacaccctggagtgacatcgaatgtgtccacaaagaatcaggtacaaagcacagtggggaagtcccagctgtggaggagacggtgacctccagcccagggactcctgcctctccctgttctctctcaggcatcatcataggagtcacagttgcagccgtagtcttgattgtggctgtgtttgttcagcttggactgcacatctggcagctgaggagtcagtgcatgtggccccgagagacccagctgctgctggaggtgccgccgtcgaccgaagacgccagaagctgccagttccccgaggaagagcggggcgagcgatcggcagaggagaaggggcggctgggagacctgtgggtgtga

SEQ ID NO: 2922 - DNA, 2808 bp, Artificial Sequence
  Synthetic Polynucleotide
atggccttaccagtgaccgccttgctcctgccgctggccttgctgctccacgccgccaggccgaatgctggcgtgacccagacacctaagttccaggtgctgaaaaccggccagagcatgaccctgcaatgcgcccaggacatgaaccatgagtacatgagctggtacagacaggaccccggcatgggcctgagactgatccactactctgtggctatccagaccaccgaccagggcgaagtgcccaatggctacaacgtgtccagaagcaccatcgaggacttcccactgagactgctgtctgccgctcctagccagaccagcgtgtacttttgtgccagcagctacctgggcaacaccggcgagctgttttttggcgagggcagcagactgaccgtggaggacctgaagaacgtgttcccacctgaggtggccgtgttcgagcctagcaaggccgagatcgcccacacccagaaagccaccctcgtgtgcctggctaccggcttctaccccgaccatgtggaactgtcttggtgggtcaacggcaaagaggtgcacagcggcgtgtgtaccgacccccagccactgaaagaacagcccgccctgaacgacagccggtactgcctgagcagcagactgagagtgtccgccaccttctggcagaacccccggaaccacttcagatgccaggtgcagttctacggcctgagcgagaacgacgagtggacccaggacagagccaagcccgtgacccagatcgtgtctgccgaagcctggggcagagccgattgcggcatcaccagcgccagctaccaccagggcgtgctgagcgccaccatcctgtacgagatcctgctgggcaaggccaccctgtacgccgtgctggtgtctgccctggtgctgatggctatggtcaagcggaaggacagccggggaagggccaagcgatctggatctggagcaacaaacttctcactactcaaacaagcaggtgacgtggaggagaatcccgggcctactagtatggactggatttggcgcatccttttccttgtcggcgctgctaccggcgcgcattccaatgctggcgtgacccagacacctaagttccaggtgctgaaaaccggccagagcatgaccctgcaatgcgcccaggacatgaaccatgagtacatgagctggtacagacaggaccccggcatgggcctgagactgatccactactctgtggctatccagaccaccgaccagggcgaagtgcccaatggctacaacgtgtccagaagcaccatcgaggacttcccactgagactgctgtctgccgctcctagccagaccagcgtgtacttttgtgccagcagctacctgggcaacaccggcgagctgttttttggcgagggcagcagactgaccgtgatccagaaccctgatcctgccgtgtaccagctgcgggatagcaagagcagcgacaagagcgtgtgtctgttcaccgacttcgacagccagaccaacgtgtcccagagcaaggactccgacgtgtacatcaccgataagtgcgtgctggacatgcggagcatggacttcaagagcaactccgccgtggcctggtccaacaagtccgatttcgcctgcgccaacgccttcaacaacagcattatccccgaggacacattcttcccaagcagcgacgtgccctgcgacgtgaagctggtggaaaagagcttcgagacagacaccaacctgaacttccagaacctgagcgtgatcggcttcagaatcctgctgctgaaagtggccggctttaacctgctgatgaccctgcggctgtggtccagccgcgccaagagaagcggatctggcgtgaagcagaccctgaatttcgacctgctgaagctggctggcgacgtggaatccaacccaggcccttctagaggccatatggaacaacggggacagaacgccccggccgcttcgggggcccggaaaaggcacggcccaggacccagggaggcgcggggagccaggcctgggccccgggtccccaagacccttgtgctcgttgtcgccgcggtcctgctgttggtctcagctgagtctgctctgatcacccaacaagacctagctccccagcagagagcggccccacaacaaaagaggtccagcccctcagagggattgtgtccacctggacaccatatctcagaagacggtagagattgcatctcctgcaaatatggacaggactatagcactcactggaatgacctccttttctgcttgcgctgcaccaggtgtgattcaggtgaagtggagctaagtccctgcaccacgaccagaaacacagtgtgtcagtgcgaagaaggcaccttccgggaagaagattctcctgagatgtgccggaagtgccgcacagggtgtcccagagggatggtcaaggtcggtgattgtacaccctggagtgacatcgaatgtgtccacaaagaatcaggtacaaagcacagtggggaagtcccagctgtggaggagacggtgacctccagcccagggactcctgcctctccctgttctctctcaggcatcatcataggagtcacagttgcagccgtagtcttgattgtggctgtgtttgttcagcttggactgcacatctggcagctgaggagtcagtgcatgtggccccgagagacccagctgctgctggaggtgccgccgtcgaccgaagacgccagaagctgccagttccccgaggaagagcggggcgagcgatcggcagaggagaaggggcggctgggagacctgtgggtgtga

SEQ ID NO: 2923 - DNA, 2820 bp, Artificial Sequence
  Synthetic Polynucleotide
atgctcctgctgctcgtcccagtgctcgaggtgatttttaccctgggaggaaccagagcccagtcggtgacccagcttggcagccacgtctctgtctctgagggagccctggttctgctgaggtgcaactactcatcgtctgttccaccatatctcttctggtatgtgcaataccccaaccaaggactccagcttctcctgaagcacacaacaggggccaccctggttaaaggcatcaacggttttgaggctgaatttaagaagagtgaaacctccttccacctgacgaaaccctcagcccatatgagcgacgcggctgagtacttctgtgctgtgagtgattctagggctgcaggcaacaagctaacttttggaggaggaaccagggtgctagttaaaccaaatatccagaaccctgaccctgccgtgtaccagctgagagactctaaatccagtgacaagtctgtctgcctattcaccgattttgattctcaaacaaatgtgtcacaaagtaaggattctgatgtgtatatcacagacaaaactgtgctagacatgaggtctatggacttcaagagcaacagtgctgtggcctggagcaacaaatctgactttgcatgtgcaaacgccttcaacaacagcattattccagaagacaccttcttccccagcccagaaagttcctgtgatgtcaagctggtcgagaaaagctttgaaacagatacgaacctaaactttcaaaacctgtcagtgattgggttccgaatcctcctcctgaaagtggccgggtttaatctgctcatgacgctgcggctgtggtccagcagggccaagcgatctggatctggagcaacaaacttctcactactcaaacaagcaggtgacgtggaggagaatcccgggcctactagtatgggaatcaggctcctctgtcgtgtggccttttgtttcctggctgtaggcctcgtagatgtgaaagtaacccagagctcgagatatctagtcaaaaggacgggagagaaagtttttctggaatgtgtccaggatatggaccatgaaaatatgttctggtatcgacaagacccaggtctggggctacggctgatctatttctcatatgatgttaaaatgaaagaaaaaggagatattcctgaggggtacagtgtctctagagagaagaaggagcgcttctccctgattctggagtccgccagcaccaaccagacatctatgtacctctgtgccagcagattccccgggacagcctataattcacccctccactttgggaatgggaccaggctcactgtgacagaggacctgaacaaggtgttcccacccgaggtcgctgtgtttgagccatcagaagcagagatctcccacacccaaaaggccacactggtgtgcctggccacaggcttcttccctgaccacgtggagctgagctggtgggtgaatgggaaggaggtgcacagtggggtcagcacggacccgcagcccctcaaggagcagcccgccctcaatgactccagatactgcctgagcagccgcctgagggtctcggccaccttctggcagaacccccgcaaccacttccgctgtcaagtccagttctacgggctctcggagaatgacgagtggacccaggatagggccaaacccgtcacccagatcgtcagcgccgaggcctggggtagagcagactgtggctttacctcggtgtcctaccagcaaggggtcctgtctgccaccatcctctatgagatcctgctagggaaggccaccctgtatgctgtgctggtcagcgcccttgtgttgatggccatggtcaagagaaaggatttctgacgcgccaagagaagcggatctggcgtgaagcagaccctgaatttcgacctgctgaagctggctggcgacgtggaatccaacccaggcccttctagaggccatatggaacaacggggacagaacgccccggccgcttcgggggcccggaaaaggcacggcccaggacccagggaggcgcggggagccaggcctgggccccgggtccccaagacccttgtgctcgttgtcgccgcggtcctgctgttggtctcagctgagtctgctctgatcacccaacaagacctagctccccagcagagagcggccccacaacaaaagaggtccagcccctcagagggattgtgtccacctggacaccatatctcagaagacggtagagattgcatctcctgcaaatatggacaggactatagcactcactggaatgacctccttttctgcttgcgctgcaccaggtgtgattcaggtgaagtggagctaagtccctgcaccacgaccagaaacacagtgtgtcagtgcgaagaaggcaccttccgggaagaagattctcctgagatgtgccggaagtgccgcacagggtgtcccagagggatggtcaaggtcggtgattgtacaccctggagtgacatcgaatgtgtccacaaagaatcaggtacaaagcacagtggggaagtcccagctgtggaggagacggtgacctccagcccagggactcctgcctctccctgttctctctcaggcatcatcataggagtcacagttgcagccgtagtcttgattgtggctgtgtttgttcagcttggactgcacatctggcagctgaggagtcagtgcatgtggccccgagagacccagctgctgctggaggtgccgccgtcgaccgaagacgccagaagctgccagttccccgaggaagagcggggcgagcgatcggcagaggagaaggggcggctgggagacctgtgggtgtga

SEQ ID NO: 2924 - DNA, 23 bp, Artificial Sequence
  Synthetic Polynucleotide
  misc_feature (1)..(23): n is a, c, g, or t
nnnnnnnnnnnnnnnnnnnnnnn

SEQ ID NO: 2925 - DNA, 2592 bp, Artificial Sequence
  Synthetic Polynucleotide
atggccttaccagtgaccgccttgctcctgccgctggccttgctgctccacgccgccaggccggacatccagatgacacagactacatcctccctgtctgcctctctgggagacagagtcaccatcagttgcagggcaagtcaggacattagtaaatatttaaattggtatcagcagaaaccagatggaactgttaaactcctgatctaccatacatcaagattacactcaggagtcccatcaaggttcagtggcagtgggtctggaacagattattctctcaccattagcaacctggagcaagaagatattgccacttacttttgccaacagggtaatacgcttccgtacacgttcggaggggggaccaagctggagatcacaggtggcggtggctcgggcggtggtgggtcgggtggcggcggatctgaggtgaaactgcaggagtcaggacctggcctggtggcgccctcacagagcctgtccgtcacatgcactgtctcaggggtctcattacccgactatggtgtaagctggattcgccagcctccacgaaagggtctggagtggctgggagtaatatggggtagtgaaaccacatactataattcagctctcaaatccagactgaccatcatcaaggacaactccaagagccaagttttcttaaaaatgaacagtctgcaaactgatgacacagccatttactactgtgccaaacattattactacggtggtagctatgctatggactactggggtcaaggaacctcagtcaccgtctcctcacgcgtagagcagaaactgatctcggaagaggatctggcgaagcccaccacgacgccagcgccgcgaccaccaacaccggcgcccaccatcgcgtcgcagcccctgtccctgcgcccagaggcgtgccggccagcggcggggggcgcagtgcacacgagggggctggacttcgcctgtgacatctacatctgggcgcccttggccgggacttgtggggtccttctcctgtcactggttatcaccctttactgcaaacggggcagaaagaaactcctgtatatattcaaacaaccatttatgagaccagtacaaactactcaagaggaagatggctgtagctgccgatttccagaagaagaagaaggaggatgtgaactgagagtgaagttcagcaggagcgcagacgcccccgcgtaccagcagggccagaaccagctctataacgagctgaatctaggacgaagagaggagtacgatgttttggacaagagacgtggccgggaccctgagatggggggaaagccgagaaggaagaaccctcaggaaggcctgtacaatgaactgcagaaagataagatggcggaggcctacagtgagattgggatgaaaggcgagcgccggaggggcaaggggcacgatggcctttaccagggtctcagtacagccaccaaggacacctacgacgcccttcacatgcaggccctgccccctcgctctagtggctccggcgagggcagaggaagtctactaacctgcggagatgtggaagaaaatcctggcccacatatggaacaacggggacagaacgccccggccgcttcgggggcccggaaaaggcacggcccaggacccagggaggcgcggggagccaggcctgggccccgggtccccaagacccttgtgctcgttgtcgccgcggtcctgctgttggtctcagctgagtctgctctgatcacccaacaagacctagctccccagcagagagcggccccacaacaaaagaggtccagcccctcagagggattgtgtccacctggacaccatatctcagaagacggtagagattgcatctcctgcaaatatggacaggactatagcactcactggaatgacctccttttctgcttgcgctgcaccaggtgtgattcaggtgaagtggagctaagtccctgcaccacgaccagaaacacagtgtgtcagtgcgaagaaggcaccttccgggaagaagattctcctgagatgtgccggaagtgccgcacagggtgtcccagagggatggtcaaggtcggtgattgtacaccctggagtgacatcgaatgtgtccacaaagaatcaggtacaaagcacagtggggaagtcccagctgtggaggagacggtgacctccagcccagggactcctgcctctccctgttctctctcaggcatcatcataggagtcacagttgcagccgtagtcttgattgtggctgtgtttgttcggaagatcaacagcgagcccctgaaggacgagttcaagaataccggctctggcctgctcggcatggctaacatcgacctggaaaagagcagaaccggcgacgagatcatcctgccaaggggccttgagtacaccgtggaagagtgtacctgcgaggactgcatcaagagcaagcccaaggtggacagcgaccactgctttccactgcctgctatggaagagggcgctaccatcctggtcaccaccaagaccaacgactactgcaagagcctgcctgccgctctgtctgccaccgagatcgagaagtctatcagcgccagatga

SEQ ID NO: 2926 - DNA, 3066 bp, Artificial Sequence
  Synthetic Polynucleotide
atggccttaccagtgaccgccttgctcctgccgctggccttgctgctccacgccgccaggccggacatccagatgacacagactacatcctccctgtctgcctctctgggagacagagtcaccatcagttgcagggcaagtcaggacattagtaagtacctgaactggtatcagcagaaaccagatggaactgttaaactcctgatctaccatacatcaagattacactcaggagtcccatcaaggttcagtggcagtgggtctggaacagattattctctcaccattagcaacctggagcaagaagatattgccacttacttttgccaacagggtaatacgcttccgtacacgttcggaggggggaccaagctggagatcacactcgaggggaaaccaattcccaaccctcttctgggactggattcaaccggcagcggcgaggacctgaagaacgtgttcccacctgaggtggccgtgttcgagcctagcaaggccgagatcgcccacacccagaaagccaccctcgtgtgcctggctaccggcttctaccccgaccatgtggaactgtcttggtgggtcaacggcaaagaggtgcacagcggcgtgtgtaccgacccccagccactgaaagaacagcccgccctgaacgacagccggtactgcctgagcagcagactgagagtgtccgccaccttctggcagaacccccggaaccacttcagatgccaggtgcagttctacggcctgagcgagaacgacgagtggacccaggacagagccaagcccgtgacccagatcgtgtctgccgaagcctggggcagagccgattgcggcatcaccagcgccagctaccaccagggcgtgctgagcgccaccatcctgtacgagatcctgctgggcaaggccaccctgtacgccgtgctggtgtctgccctggtgctgatggctatggtcaagcggaaggacagccggggaagggccaagcgatctggatctggagcaacaaacttctcactactcaaacaagcaggtgacgtggaggagaatcccgggcctactagtatggactggatttggcgcatccttttccttgtcggcgctgctaccggcgcgcattccttcgaagtgaaactgcaggagtcaggacctggcctggtggcgccctcacagagcctgtccgtcacatgcactgtctcaggggtctcattacccgactatggtgtaagctggattcgccagcctccacgaaagggtctggagtggctgggagtaatatggggtagtgaaaccacatactataattcagctctcaaatccagactgaccatcatcaaggacaactccaagagccaagttttcttaaaaatgaacagtctgcaaactgatgacacagccatttactactgtgccaaacattattactacggtggtagctatgctatggactactggggccaaggaacctcagtcaccgtctcctcaacgcgtgagcagaaactgatctcggaagaggatgggagcggcatccagaaccctgatcctgccgtgtaccagctgcgggatagcaagagcagcgacaagagcgtgtgtctgttcaccgacttcgacagccagaccaacgtgtcccagagcaaggactccgacgtgtacatcaccgataagtgcgtgctggacatgcggagcatggacttcaagagcaactccgccgtggcctggtccaacaagtccgatttcgcctgcgccaacgccttcaacaacagcattatccccgaggacacattcttcccaagcagcgacgtgccctgcgacgtgaagctggtggaaaagagcttcgagacagacaccaacctgaacttccagaacctgagcgtgatcggcttcagaatcctgctgctgaaagtggccggctttaacctgctgatgaccctgcggctgtggtccagccgcgccaagagaagcggatctggcgtgaagcagaccctgaatttcgacctgctgaagctggctggcgacgtggaatccaacccaggcccttctagaggccatatggaacaacggggacagaacgccccggccgcttcgggggcccggaaaaggcacggcccaggacccagggaggcgcggggagccaggcctgggccccgggtccccaagacccttgtgctcgttgtcgccgcggtcctgctgttggtctcagctgagtctgctctgatcacccaacaagacctagctccccagcagagagcggccccacaacaaaagaggtccagcccctcagagggattgtgtccacctggacaccatatctcagaagacggtagagattgcatctcctgcaaatatggacaggactatagcactcactggaatgacctccttttctgcttgcgctgcaccaggtgtgattcaggtgaagtggagctaagtccctgcaccacgaccagaaacacagtgtgtcagtgcgaagaaggcaccttccgggaagaagattctcctgagatgtgccggaagtgccgcacagggtgtcccagagggatggtcaaggtcggtgattgtacaccctggagtgacatcgaatgtgtccacaaagaatcaggtacaaagcacagtggggaagtcccagctgtggaggagacggtgacctccagcccagggactcctgcctctccctgttctctctcaggcatcatcataggagtcacagttgcagccgtagtcttgattgtggctgtgtttgttcggaagatcaacagcgagcccctgaaggacgagttcaagaataccggctctggcctgctcggcatggctaacatcgacctggaaaagagcagaaccggcgacgagatcatcctgccaaggggccttgagtacaccgtggaagagtgtacctgcgaggactgcatcaagagcaagcccaaggtggacagcgaccactgctttccactgcctgctatggaagagggcgctaccatcctggtcaccaccaagaccaacgactactgcaagagcctgcctgccgctctgtctgccaccgagatcgagaagtctatcagcgccagatga

SEQ ID NO: 2927 - DNA, 2484 bp, Artificial Sequence
  Synthetic Polynucleotide
atggccttaccagtgaccgccttgctcctgccgctggccttgctgctccacgccgccaggccggacatccagatgacacagactacatcctccctgtctgcctctctgggagacagagtcaccatcagttgcagggcaagtcaggacattagtaaatatttaaattggtatcagcagaaaccagatggaactgttaaactcctgatctaccatacatcaagattacactcaggagtcccatcaaggttcagtggcagtgggtctggaacagattattctctcaccattagcaacctggagcaagaagatattgccacttacttttgccaacagggtaatacgcttccgtacacgttcggaggggggaccaagctggagatcacaggtggcggtggctcgggcggtggtgggtcgggtggcggcggatctgaggtgaaactgcaggagtcaggacctggcctggtggcgccctcacagagcctgtccgtcacatgcactgtctcaggggtctcattacccgactatggtgtaagctggattcgccagcctccacgaaagggtctggagtggctgggagtaatatggggtagtgaaaccacatactataattcagctctcaaatccagactgaccatcatcaaggacaactccaagagccaagttttcttaaaaatgaacagtctgcaaactgatgacacagccatttactactgtgccaaacattattactacggtggtagctatgctatggactactggggtcaaggaacctcagtcaccgtctcctcacgcgtagagcagaaactgatctcggaagaggatctggcgaagcccaccacgacgccagcgccgcgaccaccaacaccggcgcccaccatcgcgtcgcagcccctgtccctgcgcccagaggcgtgccggccagcggcggggggcgcagtgcacacgagggggctggacttcgcctgtgacatctacatctgggcgcccttggccgggacttgtggggtccttctcctgtcactggttatcaccctttactgcgggcgcgccagagtgaagttcagcaggagcgcagacgcccccgcgtaccagcagggccagaaccagctctataacgagctgaatctaggacgaagagaggagtacgatgttttggacaagagacgtggccgggaccctgagatggggggaaagccgagaaggaagaaccctcaggaaggcctgtacaatgaactgcagaaagataagatggcggaggcctacagtgagattgggatgaaaggcgagcgccggaggggcaaggggcacgatggcctttaccagggtctcagtacagccaccaaggacacctacgacgcccttcacatgcaggccctgccccctcgctctagaggatctggagcaacaaacttctcactactcaaacaagcaggtgacgtggaggagaatcccgggcctgggatccacatggaacaacggggacagaacgccccggccgcttcgggggcccggaaaaggcacggcccaggacccagggaggcgcggggagccaggcctgggccccgggtccccaagacccttgtgctcgttgtcgccgcggtcctgctgttggtctcagctgagtctgctctgatcacccaacaagacctagctccccagcagagagcggccccacaacaaaagaggtccagcccctcagagggattgtgtccacctggacaccatatctcagaagacggtagagattgcatctcctgcaaatatggacaggactatagcactcactggaatgacctccttttctgcttgcgctgcaccaggtgtgattcaggtgaagtggagctaagtccctgcaccacgaccagaaacacagtgtgtcagtgcgaagaaggcaccttccgggaagaagattctcctgagatgtgccggaagtgccgcacagggtgtcccagagggatggtcaaggtcggtgattgtacaccctggagtgacatcgaatgtgtccacaaagaatcaggtacaaagcacagtggggaagtcccagctgtggaggagacggtgacctccagcccagggactcctgcctctccctgttctctctcaggcatcatcataggagtcacagttgcagccgtagtcttgattgtggctgtgtttgttcggaagatcaacagcgagcccctgaaggacgagttcaagaataccggctctggcctgctcggcatggctaacatcgacctggaaaagagcagaaccggcgacgagatcatcctgccaaggggccttgagtacaccgtggaagagtgtacctgcgaggactgcatcaagagcaagcccaaggtggacagcgaccactgctttccactgcctgctatggaagagggcgctaccatcctggtcaccaccaagaccaacgactactgcaagagcctgcctgccgctctgtctgccaccgagatcgagaagtctatcagcgccagatga

SEQ ID NO: 2928 - DNA, 2448 bp, Artificial Sequence
  Synthetic Polynucleotide
atggccttaccagtgaccgccttgctcctgccgctggccttgctgctccacgccgccaggccggacatccagatgacacagactacatcctccctgtctgcctctctgggagacagagtcaccatcagttgcagggcaagtcaggacattagtaaatatttaaattggtatcagcagaaaccagatggaactgttaaactcctgatctaccatacatcaagattacactcaggagtcccatcaaggttcagtggcagtgggtctggaacagattattctctcaccattagcaacctggagcaagaagatattgccacttacttttgccaacagggtaatacgcttccgtacacgttcggaggggggaccaagctggagatcacaggtggcggtggctcgggcggtggtgggtcgggtggcggcggatctgaggtgaaactgcaggagtcaggacctggcctggtggcgccctcacagagcctgtccgtcacatgcactgtctcaggggtctcattacccgactatggtgtaagctggattcgccagcctccacgaaagggtctggagtggctgggagtaatatggggtagtgaaaccacatactataattcagctctcaaatccagactgaccatcatcaaggacaactccaagagccaagttttcttaaaaatgaacagtctgcaaactgatgacacagccatttactactgtgccaaacattattactacggtggtagctatgctatggactactggggtcaaggaacctcagtcaccgtctcctcacgcgtagacggtaacgaggagatgggaggaatcactcaaaccccttacaaagtctcaatttcaggaacaactgttatccttacatgtccccagtatcctggcagcgagatcctttggcagcataacgacaagaatatagggggagatgaagacgataagaatatcggatctgacgaggatcacttgagcctgaaagagttctccgagcttgaacaaagcggatattatgtgtgctatccgcgcgggtcaaagccggaagacgctaacttttacctttatctccgagccagagtgtgcgaaaattgcatggaaatggacgttatgtccgttgctacaatagttatcgtagatatatgcatcacgggtggactgcttctgctggtttattattggtccaagaatagaaaggccaaagctaaacccgtgaccagaggcgctggcgcaggcggaaggcaaaggggacaaaacaaagaacggccaccaccagtgccaaatccagattatgagcctattcggaaaggacagagggacctgtactctggcctgaatcagagaagaatctctagaggatctggagcaacaaacttctcactactcaaacaagcaggtgacgtggaggagaatcccgggcctgggatccacatggaacaacggggacagaacgccccggccgcttcgggggcccggaaaaggcacggcccaggacccagggaggcgcggggagccaggcctgggccccgggtccccaagacccttgtgctcgttgtcgccgcggtcctgctgttggtctcagctgagtctgctctgatcacccaacaagacctagctccccagcagagagcggccccacaacaaaagaggtccagcccctcagagggattgtgtccacctggacaccatatctcagaagacggtagagattgcatctcctgcaaatatggacaggactatagcactcactggaatgacctccttttctgcttgcgctgcaccaggtgtgattcaggtgaagtggagctaagtccctgcaccacgaccagaaacacagtgtgtcagtgcgaagaaggcaccttccgggaagaagattctcctgagatgtgccggaagtgccgcacagggtgtcccagagggatggtcaaggtcggtgattgtacaccctggagtgacatcgaatgtgtccacaaagaatcaggtacaaagcacagtggggaagtcccagctgtggaggagacggtgacctccagcccagggactcctgcctctccctgttctctctcaggcatcatcataggagtcacagttgcagccgtagtcttgattgtggctgtgtttgttcggaagatcaacagcgagcccctgaaggacgagttcaagaataccggctctggcctgctcggcatggctaacatcgacctggaaaagagcagaaccggcgacgagatcatcctgccaaggggccttgagtacaccgtggaagagtgtacctgcgaggactgcatcaagagcaagcccaaggtggacagcgaccactgctttccactgcctgctatggaagagggcgctaccatcctggtcaccaccaagaccaacgactactgcaagagcctgcctgccgctctgtctgccaccgagatcgagaagtctatcagcgccagatga

SEQ ID NO: 2929 - DNA, 2343 bp, Artificial Sequence
  Synthetic Polynucleotide
atggccttaccagtgaccgccttgctcctgccgctggccttgctgctccacgccgccaggccggacatccagatgacacagactacatcctccctgtctgcctctctgggagacagagtcaccatcagttgcagggcaagtcaggacattagtaaatatttaaattggtatcagcagaaaccagatggaactgttaaactcctgatctaccatacatcaagattacactcaggagtcccatcaaggttcagtggcagtgggtctggaacagattattctctcaccattagcaacctggagcaagaagatattgccacttacttttgccaacagggtaatacgcttccgtacacgttcggaggggggaccaagctggagatcacaggtggcggtggctcgggcggtggtgggtcgggtggcggcggatctgaggtgaaactgcaggagtcaggacctggcctggtggcgccctcacagagcctgtccgtcacatgcactgtctcaggggtctcattacccgactatggtgtaagctggattcgccagcctccacgaaagggtctggagtggctgggagtaatatggggtagtgaaaccacatactataattcagctctcaaatccagactgaccatcatcaaggacaactccaagagccaagttttcttaaaaatgaacagtctgcaaactgatgacacagccatttactactgtgccaaacattattactacggtggtagctatgctatggactactggggtcaaggaacctcagtcaccgtctcctcacgcgtattcaagatccccatcgaggaactggaagatcgggtgttcgtgaactgcaacacctctatcacctgggtggaaggcaccgtgggaacactgctgagcgacatcaccagactggacctcggcaagcggattctggaccctcggggcatctacagatgcaacggcaccgacatctacaaggacaaagaaagcaccgtgcaggtccactacagaatgtgccagtcctgcgtggaactggaccctgctacagtggccggcatcatcgtgaccgatgtgatcgctactctgctgctggctctgggagtgttctgcttcgccggacacgaaacaggcagactgtctggcgctgccgatacacaggccctgctgagaaacgaccaagtgtatcagcccctgcgcgacagagatgatgcccagtattctcacctcggcggcaactgggctagaaacaagtctagaggatctggagcaacaaacttctcactactcaaacaagcaggtgacgtggaggagaatcccgggcctgggatccacatggaacaacggggacagaacgccccggccgcttcgggggcccggaaaaggcacggcccaggacccagggaggcgcggggagccaggcctgggccccgggtccccaagacccttgtgctcgttgtcgccgcggtcctgctgttggtctcagctgagtctgctctgatcacccaacaagacctagctccccagcagagagcggccccacaacaaaagaggtccagcccctcagagggattgtgtccacctggacaccatatctcagaagacggtagagattgcatctcctgcaaatatggacaggactatagcactcactggaatgacctccttttctgcttgcgctgcaccaggtgtgattcaggtgaagtggagctaagtccctgcaccacgaccagaaacacagtgtgtcagtgcgaagaaggcaccttccgggaagaagattctcctgagatgtgccggaagtgccgcacagggtgtcccagagggatggtcaaggtcggtgattgtacaccctggagtgacatcgaatgtgtccacaaagaatcaggtacaaagcacagtggggaagtcccagctgtggaggagacggtgacctccagcccagggactcctgcctctccctgttctctctcaggcatcatcataggagtcacagttgcagccgtagtcttgattgtggctgtgtttgttcggaagatcaacagcgagcccctgaaggacgagttcaagaataccggctctggcctgctcggcatggctaacatcgacctggaaaagagcagaaccggcgacgagatcatcctgccaaggggccttgagtacaccgtggaagagtgtacctgcgaggactgcatcaagagcaagcccaaggtggacagcgaccactgctttccactgcctgctatggaagagggcgctaccatcctggtcaccaccaagaccaacgactactgcaagagcctgcctgccgctctgtctgccaccgagatcgagaagtctatcagcgccagatga

SEQ ID NO: 2930 - DNA, 2373 bp, Artificial Sequence
  Synthetic Polynucleotide
atggccttaccagtgaccgccttgctcctgccgctggccttgctgctccacgccgccaggccggacatccagatgacacagactacatcctccctgtctgcctctctgggagacagagtcaccatcagttgcagggcaagtcaggacattagtaaatatttaaattggtatcagcagaaaccagatggaactgttaaactcctgatctaccatacatcaagattacactcaggagtcccatcaaggttcagtggcagtgggtctggaacagattattctctcaccattagcaacctggagcaagaagatattgccacttacttttgccaacagggtaatacgcttccgtacacgttcggaggggggaccaagctggagatcacaggtggcggtggctcgggcggtggtgggtcgggtggcggcggatctgaggtgaaactgcaggagtcaggacctggcctggtggcgccctcacagagcctgtccgtcacatgcactgtctcaggggtctcattacccgactatggtgtaagctggattcgccagcctccacgaaagggtctggagtggctgggagtaatatggggtagtgaaaccacatactataattcagctctcaaatccagactgaccatcatcaaggacaactccaagagccaagttttcttaaaaatgaacagtctgcaaactgatgacacagccatttactactgtgccaaacattattactacggtggtagctatgctatggactactggggtcaaggaacctcagtcaccgtctcctcacgcgtacagagcatcaagggcaaccacctggtcaaggtgtacgactaccaagaggacggcagcgtgctgctgacatgtgatgccgaggccaagaacatcacctggtttaaggacggcaagatgatcggcttcctgaccgaggacaagaagaagtggaacctgggcagcaacgctaaggaccccagaggcatgtatcagtgcaagggcagccagaacaagagcaagcccctccaggtgtactaccggatgtgccagaactgcatcgagctgaacgccgctaccatcagcggctttctgttcgccgagatcgtgtccatcttcgtgctggccgtgggcgtgtactttatcgctggacaggatggcgtgcggcagagcagagcttccgataagcaaaccctgctgcctaacgaccagctgtaccagcctctgaaggacagagaggacgaccagtacagccacctccagggcaatcagctgagaagaaactctagaggatctggagcaacaaacttctcactactcaaacaagcaggtgacgtggaggagaatcccgggcctgggatccacatggaacaacggggacagaacgccccggccgcttcgggggcccggaaaaggcacggcccaggacccagggaggcgcggggagccaggcctgggccccgggtccccaagacccttgtgctcgttgtcgccgcggtcctgctgttggtctcagctgagtctgctctgatcacccaacaagacctagctccccagcagagagcggccccacaacaaaagaggtccagcccctcagagggattgtgtccacctggacaccatatctcagaagacggtagagattgcatctcctgcaaatatggacaggactatagcactcactggaatgacctccttttctgcttgcgctgcaccaggtgtgattcaggtgaagtggagctaagtccctgcaccacgaccagaaacacagtgtgtcagtgcgaagaaggcaccttccgggaagaagattctcctgagatgtgccggaagtgccgcacagggtgtcccagagggatggtcaaggtcggtgattgtacaccctggagtgacatcgaatgtgtccacaaagaatcaggtacaaagcacagtggggaagtcccagctgtggaggagacggtgacctccagcccagggactcctgcctctccctgttctctctcaggcatcatcataggagtcacagttgcagccgtagtcttgattgtggctgtgtttgttcggaagatcaacagcgagcccctgaaggacgagttcaagaataccggctctggcctgctcggcatggctaacatcgacctggaaaagagcagaaccggcgacgagatcatcctgccaaggggccttgagtacaccgtggaagagtgtacctgcgaggactgcatcaagagcaagcccaaggtggacagcgaccactgctttccactgcctgctatggaagagggcgctaccatcctggtcaccaccaagaccaacgactactgcaagagcctgcctgccgctctgtctgccaccgagatcgagaagtctatcagcgccagatga

SEQ ID NO: 2931 - DNA, 2322 bp, Artificial Sequence
  Synthetic Polynucleotide
atggccttaccagtgaccgccttgctcctgccgctggccttgctgctccacgccgccaggccggacatccagatgacacagactacatcctccctgtctgcctctctgggagacagagtcaccatcagttgcagggcaagtcaggacattagtaaatatttaaattggtatcagcagaaaccagatggaactgttaaactcctgatctaccatacatcaagattacactcaggagtcccatcaaggttcagtggcagtgggtctggaacagattattctctcaccattagcaacctggagcaagaagatattgccacttacttttgccaacagggtaatacgcttccgtacacgttcggaggggggaccaagctggagatcacaggtggcggtggctcgggcggtggtgggtcgggtggcggcggatctgaggtgaaactgcaggagtcaggacctggcctggtggcgccctcacagagcctgtccgtcacatgcactgtctcaggggtctcattacccgactatggtgtaagctggattcgccagcctccacgaaagggtctggagtggctgggagtaatatggggtagtgaaaccacatactataattcagctctcaaatccagactgaccatcatcaaggacaactccaagagccaagttttcttaaaaatgaacagtctgcaaactgatgacacagccatttactactgtgccaaacattattactacggtggtagctatgctatggactactggggtcaaggaacctcagtcaccgtctcctcacgcgtacagagttttgggttgttggaccctaaattgtgctatctgttggacggaatcctgttcatttacggagtgatcctgaccgcattgttcctgcgggttaagttttccagatccgcagacgcacccgcttaccaacaagggcagaaccaactctacaatgaacttaatttggggcggagggaagagtacgacgttctggacaaaaggaggggacgagatcccgagatgggcggaaagcctcagcgaaggaagaatccgcaagaggggctttataacgaactccagaaagataaaatggcagaagcctatagtgagattgggatgaagggagaaaggaggaggggtaaaggtcacgatgggttgtaccaaggattgagcacagccactaaagatacctatgatgcgctccacatgcaggccctgccgccaagatctagaggatctggagcaacaaacttctcactactcaaacaagcaggtgacgtggaggagaatcccgggcctgggatccacatggaacaacggggacagaacgccccggccgcttcgggggcccggaaaaggcacggcccaggacccagggaggcgcggggagccaggcctgggccccgggtccccaagacccttgtgctcgttgtcgccgcggtcctgctgttggtctcagctgagtctgctctgatcacccaacaagacctagctccccagcagagagcggccccacaacaaaagaggtccagcccctcagagggattgtgtccacctggacaccatatctcagaagacggtagagattgcatctcctgcaaatatggacaggactatagcactcactggaatgacctccttttctgcttgcgctgcaccaggtgtgattcaggtgaagtggagctaagtccctgcaccacgaccagaaacacagtgtgtcagtgcgaagaaggcaccttccgggaagaagattctcctgagatgtgccggaagtgccgcacagggtgtcccagagggatggtcaaggtcggtgattgtacaccctggagtgacatcgaatgtgtccacaaagaatcaggtacaaagcacagtggggaagtcccagctgtggaggagacggtgacctccagcccagggactcctgcctctccctgttctctctcaggcatcatcataggagtcacagttgcagccgtagtcttgattgtggctgtgtttgttcggaagatcaacagcgagcccctgaaggacgagttcaagaataccggctctggcctgctcggcatggctaacatcgacctggaaaagagcagaaccggcgacgagatcatcctgccaaggggccttgagtacaccgtggaagagtgtacctgcgaggactgcatcaagagcaagcccaaggtggacagcgaccactgctttccactgcctgctatggaagagggcgctaccatcctggtcaccaccaagaccaacgactactgcaagagcctgcctgccgctctgtctgccaccgagatcgagaagtctatcagcgccagatga

SEQ ID NO: 2932 - DNA, 2988 bp, Artificial Sequence
  Synthetic Polynucleotide
atggccttaccagtgaccgccttgctcctgccgctggccttgctgctccacgccgccaggccggacatccagatgacacagactacatcctccctgtctgcctctctgggagacagagtcaccatcagttgcagggcaagtcaggacattagtaagtacctgaactggtatcagcagaaaccagatggaactgttaaactcctgatctaccatacatcaagattacactcaggagtcccatcaaggttcagtggcagtgggtctggaacagattattctctcaccattagcaacctggagcaagaagatattgccacttacttttgccaacagggtaatacgcttccgtacacgttcggaggggggaccaagctggagatcacactcgagggacagcctaaggccaatcctaccgtgacactgttccctccaagcagcgaagaactccaggccaacaaggccacacttgtgtgcctgatctccgacttctaccctggggctgtgacagtggcttggaaggccgatggatctcctgtgaaagccggcgtggaaaccaccaagccatccaagcagagcaacaacaaatacgccgccagctcctacctgagcctgacacctgagcagtggaagtcccacagatcctacagctgccaagtgacccacgaaggcagcaccgtggaaaagacagtggcccctacagagtgcagcggcagagccgattgcggcatcaccagcgccagctaccaccagggcgtgctgagcgccaccatcctgtacgagatcctgctgggcaaggccaccctgtacgccgtgctggtgtctgccctggtgctgatggctatggtcaagcggaaggacagccggggaagggccaagcgatctggatctggagcaacaaacttctcactactcaaacaagcaggtgacgtggaggagaatcccgggcctactagtatggactggatttggcgcatccttttccttgtcggcgctgctaccggcgcgcattccttcgaagtgaaactgcaggagtcaggacctggcctggtggcgccctcacagagcctgtccgtcacatgcactgtctcaggggtctcattacccgactatggtgtaagctggattcgccagcctccacgaaagggtctggagtggctgggagtaatatggggtagtgaaaccacatactataattcagctctcaaatccagactgaccatcatcaaggacaactccaagagccaagttttcttaaaaatgaacagtctgcaaactgatgacacagccatttactactgtgccaaacattattactacggtggtagctatgctatggactactggggccaaggaacctcagtcaccgtctcctcaacgcgtgcctctacaaagggaccctccgtgtttcctctggctcccagcagcaagtctacaagcggaggaacagccgctctgggctgcctggtcaaggattactttcccgagcctgtgaccgtgtcctggaatagcggagcactgacaagcggcgtgcacacctttccagccgtgctgcaaagcagcggcctgtactctctgagcagcgtggtcacagtgcctagctctagcctgggcacccagacctacatctgcaatgtgaaccacaagcctagcaacaccaaggtggacaagagagtggaacccaagagctgtatccccgaggacacattcttcccaagcagcgacgtgccctgcgacgtgaagctggtggaaaagagcttcgagacagacaccaacctgaacttccagaacctgagcgtgatcggcttcagaatcctgctgctgaaagtggccggctttaacctgctgatgaccctgcggctgtggtccagccgcgccaagagaagcggatctggcgtgaagcagaccctgaatttcgacctgctgaagctggctggcgacgtggaatccaacccaggcccttctagaggccatatggaacaacggggacagaacgccccggccgcttcgggggcccggaaaaggcacggcccaggacccagggaggcgcggggagccaggcctgggccccgggtccccaagacccttgtgctcgttgtcgccgcggtcctgctgttggtctcagctgagtctgctctgatcacccaacaagacctagctccccagcagagagcggccccacaacaaaagaggtccagcccctcagagggattgtgtccacctggacaccatatctcagaagacggtagagattgcatctcctgcaaatatggacaggactatagcactcactggaatgacctccttttctgcttgcgctgcaccaggtgtgattcaggtgaagtggagctaagtccctgcaccacgaccagaaacacagtgtgtcagtgcgaagaaggcaccttccgggaagaagattctcctgagatgtgccggaagtgccgcacagggtgtcccagagggatggtcaaggtcggtgattgtacaccctggagtgacatcgaatgtgtccacaaagaatcaggtacaaagcacagtggggaagtcccagctgtggaggagacggtgacctccagcccagggactcctgcctctccctgttctctctcaggcatcatcataggagtcacagttgcagccgtagtcttgattgtggctgtgtttgttcggaagatcaacagcgagcccctgaaggacgagttcaagaataccggctctggcctgctcggcatggctaacatcgacctggaaaagagcagaaccggcgacgagatcatcctgccaaggggccttgagtacaccgtggaagagtgtacctgcgaggactgcatcaagagcaagcccaaggtggacagcgaccactgctttccactgcctgctatggaagagggcgctaccatcctggtcaccaccaagaccaacgactactgcaagagcctgcctgccgctctgtctgccaccgagatcgagaagtctatcagcgccagatga

SEQ ID NO: 2933 - DNA, 3054 bp, Artificial Sequence
  Synthetic Polynucleotide
atggccttaccagtgaccgccttgctcctgccgctggccttgctgctccacgccgccaggccggacatccagatgacacagactacatcctccctgtctgcctctctgggagacagagtcaccatcagttgcagggcaagtcaggacattagtaagtacctgaactggtatcagcagaaaccagatggaactgttaaactcctgatctaccatacatcaagattacactcaggagtcccatcaaggttcagtggcagtgggtctggaacagattattctctcaccattagcaacctggagcaagaagatattgccacttacttttgccaacagggtaatacgcttccgtacacgttcggaggggggaccaagctggagatcacactcgagggacagcctaaggccaatcctaccgtgacactgttccctccaagcagcgaagaactccaggccaacaaggccacacttgtgtgcctgatctccgacttctaccctggggctgtgacagtggcttggaaggccgatggatctcctgtgaaagccggcgtggaaaccaccaagccatccaagcagagcaacaacaaatacgccgccagctcctacctgagcctgacacctgagcagtggaagtcccacagatcctacagctgccaagtgacccacgaaggcagcaccgtggaaaagacagtggcccctacagagtgcagccccatcaagaccgatgtgattacaatggaccccaaggacaactgctccaaggacgccaacgataccctgctgctccagctgaccaacaccagcgcctactacatgtacttgttgctgctgctgaagtccgtggtgtacttcgccatcatcacatgctgcctgctgcggagaaccgccttctgctgcaacggcgagaagtctagggccaagcgatctggatctggagcaacaaacttctcactactcaaacaagcaggtgacgtggaggagaatcccgggcctactagtatggactggatttggcgcatccttttccttgtcggcgctgctaccggcgcgcattccttcgaagtgaaactgcaggagtcaggacctggcctggtggcgccctcacagagcctgtccgtcacatgcactgtctcaggggtctcattacccgactatggtgtaagctggattcgccagcctccacgaaagggtctggagtggctgggagtaatatggggtagtgaaaccacatactataattcagctctcaaatccagactgaccatcatcaaggacaactccaagagccaagttttcttaaaaatgaacagtctgcaaactgatgacacagccatttactactgtgccaaacattattactacggtggtagctatgctatggactactggggccaaggaacctcagtcaccgtctcctcaacgcgtgcctctacaaagggaccctccgtgtttcctctggctcccagcagcaagtctacaagcggaggaacagccgctctgggctgcctggtcaaggattactttcccgagcctgtgaccgtgtcctggaatagcggagcactgacaagcggcgtgcacacctttccagccgtgctgcaaagcagcggcctgtactctctgagcagcgtggtcacagtgcctagctctagcctgggcacccagacctacatctgcaatgtgaaccacaagcctagcaacaccaaggtggacaagagagtggaacccaagagctgtgaagtgaaaaccgactccaccgaccacgtgaagcccaaagagacagagaacaccaagcagcccagcaagagctgccacaagcccaaggccatcgtgcacaccgagaaagtgaacatgatgagcctgaccgtgctgggcctgcggatgctgttcgccaaaaccgtggccgtgaacttcctgctgaccgccaagctgttcttcctccgcgccaagagaagcggatctggcgtgaagcagaccctgaatttcgacctgctgaagctggctggcgacgtggaatccaacccaggcccttctagaggccatatggaacaacggggacagaacgccccggccgcttcgggggcccggaaaaggcacggcccaggacccagggaggcgcggggagccaggcctgggccccgggtccccaagacccttgtgctcgttgtcgccgcggtcctgctgttggtctcagctgagtctgctctgatcacccaacaagacctagctccccagcagagagcggccccacaacaaaagaggtccagcccctcagagggattgtgtccacctggacaccatatctcagaagacggtagagattgcatctcctgcaaatatggacaggactatagcactcactggaatgacctccttttctgcttgcgctgcaccaggtgtgattcaggtgaagtggagctaagtccctgcaccacgaccagaaacacagtgtgtcagtgcgaagaaggcaccttccgggaagaagattctcctgagatgtgccggaagtgccgcacagggtgtcccagagggatggtcaaggtcggtgattgtacaccctggagtgacatcgaatgtgtccacaaagaatcaggtacaaagcacagtggggaagtcccagctgtggaggagacggtgacctccagcccagggactcctgcctctccctgttctctctcaggcatcatcataggagtcacagttgcagccgtagtcttgattgtggctgtgtttgttcggaagatcaacagcgagcccctgaaggacgagttcaagaataccggctctggcctgctcggcatggctaacatcgacctggaaaagagcagaaccggcgacgagatcatcctgccaaggggccttgagtacaccgtggaagagtgtacctgcgaggactgcatcaagagcaagcccaaggtggacagcgaccactgctttccactgcctgctatggaagagggcgctaccatcctggtcaccaccaagaccaacgactactgcaagagcctgcctgccgctctgtctgccaccgagatcgagaagtctatcagcgccagatga

SEQ ID NO: 2934 - DNA, 2955 bp, Artificial Sequence
  Synthetic Polynucleotide
atggccttaccagtgaccgccttgctcctgccgctggccttgctgctccacgccgccaggccgaatgctggcgtgacccagacacctaagttccaggtgctgaaaaccggccagagcatgaccctgcaatgcgcccaggacatgaaccatgagtacatgagctggtacagacaggaccccggcatgggcctgagactgatccactactctgtggctatccagaccaccgaccagggcgaagtgcccaatggctacaacgtgtccagaagcaccatcgaggacttcccactgagactgctgtctgccgctcctagccagaccagcgtgtacttttgtgccagcagctacctgggcaacaccggcgagctgttttttggcgagggcagcagactgaccgtggaggacctgaagaacgtgttcccacctgaggtggccgtgttcgagcctagcaaggccgagatcgcccacacccagaaagccaccctcgtgtgcctggctaccggcttctaccccgaccatgtggaactgtcttggtgggtcaacggcaaagaggtgcacagcggcgtgtgtaccgacccccagccactgaaagaacagcccgccctgaacgacagccggtactgcctgagcagcagactgagagtgtccgccaccttctggcagaacccccggaaccacttcagatgccaggtgcagttctacggcctgagcgagaacgacgagtggacccaggacagagccaagcccgtgacccagatcgtgtctgccgaagcctggggcagagccgattgcggcatcaccagcgccagctaccaccagggcgtgctgagcgccaccatcctgtacgagatcctgctgggcaaggccaccctgtacgccgtgctggtgtctgccctggtgctgatggctatggtcaagcggaaggacagccggggaagggccaagcgatctggatctggagcaacaaacttctcactactcaaacaagcaggtgacgtggaggagaatcccgggcctactagtatggactggatttggcgcatccttttccttgtcggcgctgctaccggcgcgcattccaatgctggcgtgacccagacacctaagttccaggtgctgaaaaccggccagagcatgaccctgcaatgcgcccaggacatgaaccatgagtacatgagctggtacagacaggaccccggcatgggcctgagactgatccactactctgtggctatccagaccaccgaccagggcgaagtgcccaatggctacaacgtgtccagaagcaccatcgaggacttcccactgagactgctgtctgccgctcctagccagaccagcgtgtacttttgtgccagcagctacctgggcaacaccggcgagctgttttttggcgagggcagcagactgaccgtgatccagaaccctgatcctgccgtgtaccagctgcgggatagcaagagcagcgacaagagcgtgtgtctgttcaccgacttcgacagccagaccaacgtgtcccagagcaaggactccgacgtgtacatcaccgataagtgcgtgctggacatgcggagcatggacttcaagagcaactccgccgtggcctggtccaacaagtccgatttcgcctgcgccaacgccttcaacaacagcattatccccgaggacacattcttcccaagcagcgacgtgccctgcgacgtgaagctggtggaaaagagcttcgagacagacaccaacctgaacttccagaacctgagcgtgatcggcttcagaatcctgctgctgaaagtggccggctttaacctgctgatgaccctgcggctgtggtccagccgcgccaagagaagcggatctggcgtgaagcagaccctgaatttcgacctgctgaagctggctggcgacgtggaatccaacccaggcccttctagaggccatatggaacaacggggacagaacgccccggccgcttcgggggcccggaaaaggcacggcccaggacccagggaggcgcggggagccaggcctgggccccgggtccccaagacccttgtgctcgttgtcgccgcggtcctgctgttggtctcagctgagtctgctctgatcacccaacaagacctagctccccagcagagagcggccccacaacaaaagaggtccagcccctcagagggattgtgtccacctggacaccatatctcagaagacggtagagattgcatctcctgcaaatatggacaggactatagcactcactggaatgacctccttttctgcttgcgctgcaccaggtgtgattcaggtgaagtggagctaagtccctgcaccacgaccagaaacacagtgtgtcagtgcgaagaaggcaccttccgggaagaagattctcctgagatgtgccggaagtgccgcacagggtgtcccagagggatggtcaaggtcggtgattgtacaccctggagtgacatcgaatgtgtccacaaagaatcaggtacaaagcacagtggggaagtcccagctgtggaggagacggtgacctccagcccagggactcctgcctctccctgttctctctcaggcatcatcataggagtcacagttgcagccgtagtcttgattgtggctgtgtttgttcggaagatcaacagcgagcccctgaaggacgagttcaagaataccggctctggcctgctcggcatggctaacatcgacctggaaaagagcagaaccggcgacgagatcatcctgccaaggggccttgagtacaccgtggaagagtgtacctgcgaggactgcatcaagagcaagcccaaggtggacagcgaccactgctttccactgcctgctatggaagagggcgctaccatcctggtcaccaccaagaccaacgactactgcaagagcctgcctgccgctctgtctgccaccgagatcgagaagtctatcagcgccagatga

SEQ ID NO: 2935 - DNA, 2967 bp, Artificial Sequence
  Synthetic Polynucleotide
atgctcctgctgctcgtcccagtgctcgaggtgatttttaccctgggaggaaccagagcccagtcggtgacccagcttggcagccacgtctctgtctctgagggagccctggttctgctgaggtgcaactactcatcgtctgttccaccatatctcttctggtatgtgcaataccccaaccaaggactccagcttctcctgaagcacacaacaggggccaccctggttaaaggcatcaacggttttgaggctgaatttaagaagagtgaaacctccttccacctgacgaaaccctcagcccatatgagcgacgcggctgagtacttctgtgctgtgagtgattctagggctgcaggcaacaagctaacttttggaggaggaaccagggtgctagttaaaccaaatatccagaaccctgaccctgccgtgtaccagctgagagactctaaatccagtgacaagtctgtctgcctattcaccgattttgattctcaaacaaatgtgtcacaaagtaaggattctgatgtgtatatcacagacaaaactgtgctagacatgaggtctatggacttcaagagcaacagtgctgtggcctggagcaacaaatctgactttgcatgtgcaaacgccttcaacaacagcattattccagaagacaccttcttccccagcccagaaagttcctgtgatgtcaagctggtcgagaaaagctttgaaacagatacgaacctaaactttcaaaacctgtcagtgattgggttccgaatcctcctcctgaaagtggccgggtttaatctgctcatgacgctgcggctgtggtccagcagggccaagcgatctggatctggagcaacaaacttctcactactcaaacaagcaggtgacgtggaggagaatcccgggcctactagtatgggaatcaggctcctctgtcgtgtggccttttgtttcctggctgtaggcctcgtagatgtgaaagtaacccagagctcgagatatctagtcaaaaggacgggagagaaagtttttctggaatgtgtccaggatatggaccatgaaaatatgttctggtatcgacaagacccaggtctggggctacggctgatctatttctcatatgatgttaaaatgaaagaaaaaggagatattcctgaggggtacagtgtctctagagagaagaaggagcgcttctccctgattctggagtccgccagcaccaaccagacatctatgtacctctgtgccagcagattccccgggacagcctataattcacccctccactttgggaatgggaccaggctcactgtgacagaggacctgaacaaggtgttcccacccgaggtcgctgtgtttgagccatcagaagcagagatctcccacacccaaaaggccacactggtgtgcctggccacaggcttcttccctgaccacgtggagctgagctggtgggtgaatgggaaggaggtgcacagtggggtcagcacggacccgcagcccctcaaggagcagcccgccctcaatgactccagatactgcctgagcagccgcctgagggtctcggccaccttctggcagaacccccgcaaccacttccgctgtcaagtccagttctacgggctctcggagaatgacgagtggacccaggatagggccaaacccgtcacccagatcgtcagcgccgaggcctggggtagagcagactgtggctttacctcggtgtcctaccagcaaggggtcctgtctgccaccatcctctatgagatcctgctagggaaggccaccctgtatgctgtgctggtcagcgcccttgtgttgatggccatggtcaagagaaaggatttctgacgcgccaagagaagcggatctggcgtgaagcagaccctgaatttcgacctgctgaagctggctggcgacgtggaatccaacccaggcccttctagaggccatatggaacaacggggacagaacgccccggccgcttcgggggcccggaaaaggcacggcccaggacccagggaggcgcggggagccaggcctgggccccgggtccccaagacccttgtgctcgttgtcgccgcggtcctgctgttggtctcagctgagtctgctctgatcacccaacaagacctagctccccagcagagagcggccccacaacaaaagaggtccagcccctcagagggattgtgtccacctggacaccatatctcagaagacggtagagattgcatctcctgcaaatatggacaggactatagcactcactggaatgacctccttttctgcttgcgctgcaccaggtgtgattcaggtgaagtggagctaagtccctgcaccacgaccagaaacacagtgtgtcagtgcgaagaaggcaccttccgggaagaagattctcctgagatgtgccggaagtgccgcacagggtgtcccagagggatggtcaaggtcggtgattgtacaccctggagtgacatcgaatgtgtccacaaagaatcaggtacaaagcacagtggggaagtcccagctgtggaggagacggtgacctccagcccagggactcctgcctctccctgttctctctcaggcatcatcataggagtcacagttgcagccgtagtcttgattgtggctgtgtttgttcggaagatcaacagcgagcccctgaaggacgagttcaagaataccggctctggcctgctcggcatggctaacatcgacctggaaaagagcagaaccggcgacgagatcatcctgccaaggggccttgagtacaccgtggaagagtgtacctgcgaggactgcatcaagagcaagcccaaggtggacagcgaccactgctttccactgcctgctatggaagagggcgctaccatcctggtcaccaccaagaccaacgactactgcaagagcctgcctgccgctctgtctgccaccgagatcgagaagtctatcagcgccagatga

SEQ ID NO: 2936 - DNA, 23 bp, Artificial Sequence
  Synthetic Polynucleotide
  misc_feature (1)..(23): n is a, c, g, or t
nnnnnnnnnnnnnnnnnnnnnnn

SEQ ID NO: 2937 - DNA, 23 bp, Artificial Sequence
  Synthetic Polynucleotide
  misc_feature (1)..(23): n is a, c, g, or t
nnnnnnnnnnnnnnnnnnnnnnn

SEQ ID NO: 2938 - DNA, 23 bp, Artificial Sequence
  Synthetic Polynucleotide
  misc_feature (1)..(23): n is a, c, g, or t
nnnnnnnnnnnnnnnnnnnnnnn

SEQ ID NO: 2939 - DNA, 23 bp, Artificial Sequence
  Synthetic Polynucleotide
  misc_feature (1)..(23): n is a, c, g, or t
nnnnnnnnnnnnnnnnnnnnnnn

SEQ ID NO: 2940 - DNA, 23 bp, Artificial Sequence
  Synthetic Polynucleotide
  misc_feature (1)..(23): n is a, c, g, or t
nnnnnnnnnnnnnnnnnnnnnnn

SEQ ID NO: 2941 - DNA, 23 bp, Artificial Sequence
  Synthetic Polynucleotide
  misc_feature (1)..(23): n is a, c, g, or t
nnnnnnnnnnnnnnnnnnnnnnn

SEQ ID NO: 2942 - DNA, 23 bp, Artificial Sequence
  Synthetic Polynucleotide
  misc_feature (1)..(23): n is a, c, g, or t
nnnnnnnnnnnnnnnnnnnnnnn

SEQ ID NO: 2943 - DNA, 23 bp, Artificial Sequence
  Synthetic Polynucleotide
  misc_feature (1)..(23): n is a, c, g, or t
nnnnnnnnnnnnnnnnnnnnnnn

SEQ ID NO: 2944 - DNA, 23 bp, Artificial Sequence
  Synthetic Polynucleotide
  misc_feature (1)..(23): n is a, c, g, or t
nnnnnnnnnnnnnnnnnnnnnnn

SEQ ID NO: 2945 - protein, 968 aa, Artificial Sequence
  Synthetic Polypeptide
MALPVTALLLPLALLLHAARPDIQMTQTTSSLSASLGDRVTISCRASQDISKYLNWYQQKPDGTVKLLIYHTSRLHSGVPSRFSGSGSGTDYSLTISNLEQEDIATYFCQQGNTLPYTFGGGTKLEITGGGGSGGGGSGGGGSEVKLQESGPGLVAPSQSLSVTCTVSGVSLPDYGVSWIRQPPRKGLEWLGVIWGSETTYYNSALKSRLTIIKDNSKSQVFLKMNSLQTDDTAIYYCAKHYYYGGSYAMDYWGQGTSVTVSSRVEQKLISEEDLAKPTTTPAPRPPTPAPTIASQPLSLRPEACRPAAGGAVHTRGLDFACDIYIWAPLAGTCGVLLLSLVITLYCKRGRKKLLYIFKQPFMRPVQTTQEEDGCSCRFPEEEEGGCELRVKFSRSADAPAYQQGQNQLYNELNLGRREEYDVLDKRRGRDPEMGGKPRRKNPQEGLYNELQKDKMAEAYSEIGMKGERRRGKGHDGLYQGLSTATKDTYDALHMQALPPRSSGSGEGRGSLLTCGDVEENPGPHMEQRGQNAPAASGARKRHGPGPREARGARPGPRVPKTLVLVVAAVLLLVSAESALITQQDLAPQQRAAPQQKRSSPSEGLCPPGHHISEDGRDCISCKYGQDYSTHWNDLLFCLRCTRCDSGEVELSPCTTTRNTVCQCEEGTFREEDSPEMCRKCRTGCPRGMVKVGDCTPWSDIECVHKESGTKHSGEVPAVEETVTSSPGTPASPCSGGSGSCDKTHTCPPCPAPELLGGPSVFLFPPKPKDTLMISRTPEVTCVVVDVSHEDPEVKFNWYVDGVEVHNAKTKPREEQYNSTYRVVSVLTVLHQDWLNGKEYKCKVSNKALPAPIEKTISKAKGQPREPQVYTLPPSRDELTKNQVSLTCLVKGFYPSDIAVEWESNGQPENNYKTTPPVLDSDGSFFLYSKLTVDKSRWQQGNVFSCSVMHEALHNHYTQKSLSLSPGK

SEQ ID NO: 2946 - protein, 1126 aa, Artificial Sequence
  Synthetic Polypeptide
MALPVTALLLPLALLLHAARPDIQMTQTTSSLSASLGDRVTISCRASQDISKYLNWYQQKPDGTVKLLIYHTSRLHSGVPSRFSGSGSGTDYSLTISNLEQEDIATYFCQQGNTLPYTFGGGTKLEITLEGKPIPNPLLGLDSTGSGEDLKNVFPPEVAVFEPSKAEIAHTQKATLVCLATGFYPDHVELSWWVNGKEVHSGVCTDPQPLKEQPALNDSRYCLSSRLRVSATFWQNPRNHFRCQVQFYGLSENDEWTQDRAKPVTQIVSAEAWGRADCGITSASYHQGVLSATILYEILLGKATLYAVLVSALVLMAMVKRKDSRGRAKRSGSGATNFSLLKQAGDVEENPGPTSMDWIWRILFLVGAATGAHSFEVKLQESGPGLVAPSQSLSVTCTVSGVSLPDYGVSWIRQPPRKGLEWLGVIWGSETTYYNSALKSRLTIIKDNSKSQVFLKMNSLQTDDTAIYYCAKHYYYGGSYAMDYWGQGTSVTVSSTREQKLISEEDGSGIQNPDPAVYQLRDSKSSDKSVCLFTDFDSQTNVSQSKDSDVYITDKCVLDMRSMDFKSNSAVAWSNKSDFACANAFNNSIIPEDTFFPSSDVPCDVKLVEKSFETDTNLNFQNLSVIGFRILLLKVAGFNLLMTLRLWSSRAKRSGSGVKQTLNFDLLKLAGDVESNPGPSRGHMEQRGQNAPAASGARKRHGPGPREARGARPGPRVPKTLVLVVAAVLLLVSAESALITQQDLAPQQRAAPQQKRSSPSEGLCPPGHHISEDGRDCISCKYGQDYSTHWNDLLFCLRCTRCDSGEVELSPCTTTRNTVCQCEEGTFREEDSPEMCRKCRTGCPRGMVKVGDCTPWSDIECVHKESGTKHSGEVPAVEETVTSSPGTPASPCSGGSGSCDKTHTCPPCPAPELLGGPSVFLFPPKPKDTLMISRTPEVTCVVVDVSHEDPEVKFNWYVDGVEVHNAKTKPREEQYNSTYRVVSVLTVLHQDWLNGKEYKCKVSNKALPAPIEKTISKAKGQPREPQVYTLPPSRDELTKNQVSLTCLVKGFYPSDIAVEWESNGQPENNYKTTPPVLDSDGSFFLYSKLTVDKSRWQQGNVFSCSVMHEALHNHYTQKSLSLSPGK

SEQ ID NO: 2947 - protein, 932 aa, Artificial Sequence
  Synthetic Polypeptide
MALPVTALLLPLALLLHAARPDIQMTQTTSSLSASLGDRVTISCRASQDISKYLNWYQQKPDGTVKLLIYHTSRLHSGVPSRFSGSGSGTDYSLTISNLEQEDIATYFCQQGNTLPYTFGGGTKLEITGGGGSGGGGSGGGGSEVKLQESGPGLVAPSQSLSVTCTVSGVSLPDYGVSWIRQPPRKGLEWLGVIWGSETTYYNSALKSRLTIIKDNSKSQVFLKMNSLQTDDTAIYYCAKHYYYGGSYAMDYWGQGTSVTVSSRVEQKLISEEDLAKPTTTPAPRPPTPAPTIASQPLSLRPEACRPAAGGAVHTRGLDFACDIYIWAPLAGTCGVLLLSLVITLYCGRARVKFSRSADAPAYQQGQNQLYNELNLGRREEYDVLDKRRGRDPEMGGKPRRKNPQEGLYNELQKDKMAEAYSEIGMKGERRRGKGHDGLYQGLSTATKDTYDALHMQALPPRSRGSGATNFSLLKQAGDVEENPGPGIHMEQRGQNAPAASGARKRHGPGPREARGARPGPRVPKTLVLVVAAVLLLVSAESALITQQDLAPQQRAAPQQKRSSPSEGLCPPGHHISEDGRDCISCKYGQDYSTHWNDLLFCLRCTRCDSGEVELSPCTTTRNTVCQCEEGTFREEDSPEMCRKCRTGCPRGMVKVGDCTPWSDIECVHKESGTKHSGEVPAVEETVTSSPGTPASPCSGGSGSCDKTHTCPPCPAPELLGGPSVFLFPPKPKDTLMISRTPEVTCVVVDVSHEDPEVKFNWYVDGVEVHNAKTKPREEQYNSTYRVVSVLTVLHQDWLNGKEYKCKVSNKALPAPIEKTISKAKGQPREPQVYTLPPSRDELTKNQVSLTCLVKGFYPSDIAVEWESNGQPENNYKTTPPVLDSDGSFFLYSKLTVDKSRWQQGNVFSCSVMHEALHNHYTQKSLSLSPGK

SEQ ID NO: 2948 - protein, 920 aa, Artificial Sequence
  Synthetic Polypeptide
MALPVTALLLPLALLLHAARPDIQMTQTTSSLSASLGDRVTISCRASQDISKYLNWYQQKPDGTVKLLIYHTSRLHSGVPSRFSGSGSGTDYSLTISNLEQEDIATYFCQQGNTLPYTFGGGTKLEITGGGGSGGGGSGGGGSEVKLQESGPGLVAPSQSLSVTCTVSGVSLPDYGVSWIRQPPRKGLEWLGVIWGSETTYYNSALKSRLTIIKDNSKSQVFLKMNSLQTDDTAIYYCAKHYYYGGSYAMDYWGQGTSVTVSSRVDGNEEMGGITQTPYKVSISGTTVILTCPQYPGSEILWQHNDKNIGGDEDDKNIGSDEDHLSLKEFSELEQSGYYVCYPRGSKPEDANFYLYLRARVCENCMEMDVMSVATIVIVDICITGGLLLLVYYWSKNRKAKAKPVTRGAGAGGRQRGQNKERPPPVPNPDYEPIRKGQRDLYSGLNQRRISRGSGATNFSLLKQAGDVEENPGPGIHMEQRGQNAPAASGARKRHGPGPREARGARPGPRVPKTLVLVVAAVLLLVSAESALITQQDLAPQQRAAPQQKRSSPSEGLCPPGHHISEDGRDCISCKYGQDYSTHWNDLLFCLRCTRCDSGEVELSPCTTTRNTVCQCEEGTFREEDSPEMCRKCRTGCPRGMVKVGDCTPWSDIECVHKESGTKHSGEVPAVEETVTSSPGTPASPCSGGSGSCDKTHTCPPCPAPELLGGPSVFLFPPKPKDTLMISRTPEVTCVVVDVSHEDPEVKFNWYVDGVEVHNAKTKPREEQYNSTYRVVSVLTVLHQDWLNGKEYKCKVSNKALPAPIEKTISKAKGQPREPQVYTLPPSRDELTKNQVSLTCLVKGFYPSDIAVEWESNGQPENNYKTTPPVLDSDGSFFLYSKLTVDKSRWQQGNVFSCSVMHEALHNHYTQKSLSLSPGK

SEQ ID NO: 2949 - protein, 885 aa, Artificial Sequence
  Synthetic Polypeptide
MALPVTALLLPLALLLHAARPDIQMTQTTSSLSASLGDRVTISCRASQDISKYLNWYQQKPDGTVKLLIYHTSRLHSGVPSRFSGSGSGTDYSLTISNLEQEDIATYFCQQGNTLPYTFGGGTKLEITGGGGSGGGGSGGGGSEVKLQESGPGLVAPSQSLSVTCTVSGVSLPDYGVSWIRQPPRKGLEWLGVIWGSETTYYNSALKSRLTIIKDNSKSQVFLKMNSLQTDDTAIYYCAKHYYYGGSYAMDYWGQGTSVTVSSRVFKIPIEELEDRVFVNCNTSITWVEGTVGTLLSDITRLDLGKRILDPRGIYRCNGTDIYKDKESTVQVHYRMCQSCVELDPATVAGIIVTDVIATLLLALGVFCFAGHETGRLSGAADTQALLRNDQVYQPLRDRDDAQYSHLGGNWARNKSRGSGATNFSLLKQAGDVEENPGPGIHMEQRGQNAPAASGARKRHGPGPREARGARPGPRVPKTLVLVVAAVLLLVSAESALITQQDLAPQQRAAPQQKRSSPSEGLCPPGHHISEDGRDCISCKYGQDYSTHWNDLLFCLRCTRCDSGEVELSPCTTTRNTVCQCEEGTFREEDSPEMCRKCRTGCPRGMVKVGDCTPWSDIECVHKESGTKHSGEVPAVEETVTSSPGTPASPCSGGSGSCDKTHTCPPCPAPELLGGPSVFLFPPKPKDTLMISRTPEVTCVVVDVSHEDPEVKFNWYVDGVEVHNAKTKPREEQYNSTYRVVSVLTVLHQDWLNGKEYKCKVSNKALPAPIEKTISKAKGQPREPQVYTLPPSRDELTKNQVSLTCLVKGFYPSDIAVEWESNGQPENNYKTTPPVLDSDGSFFLYSKLTVDKSRWQQGNVFSCSVMHEALHNHYTQKSLSLSPGK

SEQ ID NO: 2950 - protein, 895 aa, Artificial Sequence
  Synthetic Polypeptide
MALPVTALLLPLALLLHAARPDIQMTQTTSSLSASLGDRVTISCRASQDISKYLNWYQQKPDGTVKLLIYHTSRLHSGVPSRFSGSGSGTDYSLTISNLEQEDIATYFCQQGNTLPYTFGGGTKLEITGGGGSGGGGSGGGGSEVKLQESGPGLVAPSQSLSVTCTVSGVSLPDYGVSWIRQPPRKGLEWLGVIWGSETTYYNSALKSRLTIIKDNSKSQVFLKMNSLQTDDTAIYYCAKHYYYGGSYAMDYWGQGTSVTVSSRVQSIKGNHLVKVYDYQEDGSVLLTCDAEAKNITWFKDGKMIGFLTEDKKKWNLGSNAKDPRGMYQCKGSQNKSKPLQVYYRMCQNCIELNAATISGFLFAEIVSIFVLAVGVYFIAGQDGVRQSRASDKQTLLPNDQLYQPLKDREDDQYSHLQGNQLRRNSRGSGATNFSLLKQAGDVEENPGPGIHMEQRGQNAPAASGARKRHGPGPREARGARPGPRVPKTLVLVVAAVLLLVSAESALITQQDLAPQQRAAPQQKRSSPSEGLCPPGHHISEDGRDCISCKYGQDYSTHWNDLLFCLRCTRCDSGEVELSPCTTTRNTVCQCEEGTFREEDSPEMCRKCRTGCPRGMVKVGDCTPWSDIECVHKESGTKHSGEVPAVEETVTSSPGTPASPCSGGSGSCDKTHTCPPCPAPELLGGPSVFLFPPKPKDTLMISRTPEVTCVVVDVSHEDPEVKFNWYVDGVEVHNAKTKPREEQYNSTYRVVSVLTVLHQDWLNGKEYKCKVSNKALPAPIEKTISKAKGQPREPQVYTLPPSRDELTKNQVSLTCLVKGFYPSDIAVEWESNGQPENNYKTTPPVLDSDGSFFLYSKLTVDKSRWQQGNVFSCSVMHEALHNHYTQKSLSLSPGK

SEQ ID NO: 2951 - protein, 878 aa, Artificial Sequence
  Synthetic Polypeptide
MALPVTALLLPLALLLHAARPDIQMTQTTSSLSASLGDRVTISCRASQDISKYLNWYQQKPDGTVKLLIYHTSRLHSGVPSRFSGSGSGTDYSLTISNLEQEDIATYFCQQGNTLPYTFGGGTKLEITGGGGSGGGGSGGGGSEVKLQESGPGLVAPSQSLSVTCTVSGVSLPDYGVSWIRQPPRKGLEWLGVIWGSETTYYNSALKSRLTIIKDNSKSQVFLKMNSLQTDDTAIYYCAKHYYYGGSYAMDYWGQGTSVTVSSRVQSFGLLDPKLCYLLDGILFIYGVILTALFLRVKFSRSADAPAYQQGQNQLYNELNLGRREEYDVLDKRRGRDPEMGGKPQRRKNPQEGLYNELQKDKMAEAYSEIGMKGERRRGKGHDGLYQGLSTATKDTYDALHMQALPPRSRGSGATNFSLLKQAGDVEENPGPGIHMEQRGQNAPAASGARKRHGPGPREARGARPGPRVPKTLVLVVAAVLLLVSAESALITQQDLAPQQRAAPQQKRSSPSEGLCPPGHHISEDGRDCISCKYGQDYSTHWNDLLFCLRCTRCDSGEVELSPCTTTRNTVCQCEEGTFREEDSPEMCRKCRTGCPRGMVKVGDCTPWSDIECVHKESGTKHSGEVPAVEETVTSSPGTPASPCSGGSGSCDKTHTCPPCPAPELLGGPSVFLFPPKPKDTLMISRTPEVTCVVVDVSHEDPEVKFNWYVDGVEVHNAKTKPREEQYNSTYRVVSVLTVLHQDWLNGKEYKCKVSNKALPAPIEKTISKAKGQPREPQVYTLPPSRDELTKNQVSLTCLVKGFYPSDIAVEWESNGQPENNYKTTPPVLDSDGSFFLYSKLTVDKSRWQQGNVFSCSVMHEALHNHYTQKSLSLSPGK

SEQ ID NO: 2952 - protein, 1100 aa, Artificial Sequence
  Synthetic Polypeptide
MALPVTALLLPLALLLHAARPDIQMTQTTSSLSASLGDRVTISCRASQDISKYLNWYQQKPDGTVKLLIYHTSRLHSGVPSRFSGSGSGTDYSLTISNLEQEDIATYFCQQGNTLPYTFGGGTKLEITLEGQPKANPTVTLFPPSSEELQANKATLVCLISDFYPGAVTVAWKADGSPVKAGVETTKPSKQSNNKYAASSYLSLTPEQWKSHRSYSCQVTHEGSTVEKTVAPTECSGRADCGITSASYHQGVLSATILYEILLGKATLYAVLVSALVLMAMVKRKDSRGRAKRSGSGATNFSLLKQAGDVEENPGPTSMDWIWRILFLVGAATGAHSFEVKLQESGPGLVAPSQSLSVTCTVSGVSLPDYGVSWIRQPPRKGLEWLGVIWGSETTYYNSALKSRLTIIKDNSKSQVFLKMNSLQTDDTAIYYCAKHYYYGGSYAMDYWGQGTSVTVSSTRASTKGPSVFPLAPSSKSTSGGTAALGCLVKDYFPEPVTVSWNSGALTSGVHTFPAVLQSSGLYSLSSVVTVPSSSLGTQTYICNVNHKPSNTKVDKRVEPKSCIPEDTFFPSSDVPCDVKLVEKSFETDTNLNFQNLSVIGFRILLLKVAGFNLLMTLRLWSSRAKRSGSGVKQTLNFDLLKLAGDVESNPGPSRGHMEQRGQNAPAASGARKRHGPGPREARGARPGPRVPKTLVLVVAAVLLLVSAESALITQQDLAPQQRAAPQQKRSSPSEGLCPPGHHISEDGRDCISCKYGQDYSTHWNDLLFCLRCTRCDSGEVELSPCTTTRNTVCQCEEGTFREEDSPEMCRKCRTGCPRGMVKVGDCTPWSDIECVHKESGTKHSGEVPAVEETVTSSPGTPASPCSGGSGSCDKTHTCPPCPAPELLGGPSVFLFPPKPKDTLMISRTPEVTCVVVDVSHEDPEVKFNWYVDGVEVHNAKTKPREEQYNSTYRVVSVLTVLHQDWLNGKEYKCKVSNKALPAPIEKTISKAKGQPREPQVYTLPPSRDELTKNQVSLTCLVKGFYPSDIAVEWESNGQPENNYKTTPPVLDSDGSFFLYSKLTVDKSRWQQGNVFSCSVMHEALHNHYTQKSLSLSPGK

SEQ ID NO: 2953 - protein, 1122 aa, Artificial Sequence
  Synthetic Polypeptide
MALPVTALLLPLALLLHAARPDIQMTQTTSSLSASLGDRVTISCRASQDISKYLNWYQQKPDGTVKLLIYHTSRLHSGVPSRFSGSGSGTDYSLTISNLEQEDIATYFCQQGNTLPYTFGGGTKLEITLEGQPKANPTVTLFPPSSEELQANKATLVCLISDFYPGAVTVAWKADGSPVKAGVETTKPSKQSNNKYAASSYLSLTPEQWKSHRSYSCQVTHEGSTVEKTVAPTECSPIKTDVITMDPKDNCSKDANDTLLLQLTNTSAYYMYLLLLLKSVVYFAIITCCLLRRTAFCCNGEKSRAKRSGSGATNFSLLKQAGDVEENPGPTSMDWIWRILFLVGAATGAHSFEVKLQESGPGLVAPSQSLSVTCTVSGVSLPDYGVSWIRQPPRKGLEWLGVIWGSETTYYNSALKSRLTIIKDNSKSQVFLKMNSLQTDDTAIYYCAKHYYYGGSYAMDYWGQGTSVTVSSTRASTKGPSVFPLAPSSKSTSGGTAALGCLVKDYFPEPVTVSWNSGALTSGVHTFPAVLQSSGLYSLSSVVTVPSSSLGTQTYICNVNHKPSNTKVDKRVEPKSCEVKTDSTDHVKPKETENTKQPSKSCHKPKAIVHTEKVNMMSLTVLGLRMLFAKTVAVNFLLTAKLFFLRAKRSGSGVKQTLNFDLLKLAGDVESNPGPSRGHMEQRGQNAPAASGARKRHGPGPREARGARPGPRVPKTLVLVVAAVLLLVSAESALITQQDLAPQQRAAPQQKRSSPSEGLCPPGHHISEDGRDCISCKYGQDYSTHWNDLLFCLRCTRCDSGEVELSPCTTTRNTVCQCEEGTFREEDSPEMCRKCRTGCPRGMVKVGDCTPWSDIECVHKESGTKHSGEVPAVEETVTSSPGTPASPCSGGSGSCDKTHTCPPCPAPELLGGPSVFLFPPKPKDTLMISRTPEVTCVVVDVSHEDPEVKFNWYVDGVEVHNAKTKPREEQYNSTYRVVSVLTVLHQDWLNGKEYKCKVSNKALPAPIEKTISKAKGQPREPQVYTLPPSRDELTKNQVSLTCLVKGFYPSDIAVEWESNGQPENNYKTTPPVLDSDGSFFLYSKLTVDKSRWQQGNVFSCSVMHEALHNHYTQKSLSLSPGK

SEQ ID NO: 2954 - protein, 1089 aa, Artificial Sequence
  Synthetic Polypeptide
MALPVTALLLPLALLLHAARPNAGVTQTPKFQVLKTGQSMTLQCAQDMNHEYMSWYRQDPGMGLRLIHYSVAIQTTDQGEVPNGYNVSRSTIEDFPLRLLSAAPSQTSVYFCASSYLGNTGELFFGEGSRLTVEDLKNVFPPEVAVFEPSKAEIAHTQKATLVCLATGFYPDHVELSWWVNGKEVHSGVCTDPQPLKEQPALNDSRYCLSSRLRVSATFWQNPRNHFRCQVQFYGLSENDEWTQDRAKPVTQIVSAEAWGRADCGITSASYHQGVLSATILYEILLGKATLYAVLVSALVLMAMVKRKDSRGRAKRSGSGATNFSLLKQAGDVEENPGPTSMDWIWRILFLVGAATGAHSNAGVTQTPKFQVLKTGQSMTLQCAQDMNHEYMSWYRQDPGMGLRLIHYSVAIQTTDQGEVPNGYNVSRSTIEDFPLRLLSAAPSQTSVYFCASSYLGNTGELFFGEGSRLTVIQNPDPAVYQLRDSKSSDKSVCLFTDFDSQTNVSQSKDSDVYITDKCVLDMRSMDFKSNSAVAWSNKSDFACANAFNNSIIPEDTFFPSSDVPCDVKLVEKSFETDTNLNFQNLSVIGFRILLLKVAGFNLLMTLRLWSSRAKRSGSGVKQTLNFDLLKLAGDVESNPGPSRGHMEQRGQNAPAASGARKRHGPGPREARGARPGPRVPKTLVLVVAAVLLLVSAESALITQQDLAPQQRAAPQQKRSSPSEGLCPPGHHISEDGRDCISCKYGQDYSTHWNDLLFCLRCTRCDSGEVELSPCTTTRNTVCQCEEGTFREEDSPEMCRKCRTGCPRGMVKVGDCTPWSDIECVHKESGTKHSGEVPAVEETVTSSPGTPASPCSGGSGSCDKTHTCPPCPAPELLGGPSVFLFPPKPKDTLMISRTPEVTCVVVDVSHEDPEVKFNWYVDGVEVHNAKTKPREEQYNSTYRVVSVLTVLHQDWLNGKEYKCKVSNKALPAPIEKTISKAKGQPREPQVYTLPPSRDELTKNQVSLTCLVKGFYPSDIAVEWESNGQPENNYKTTPPVLDSDGSFFLYSKLTVDKSRWQQGNVFSCSVMHEALHNHYTQKSLSLSPGK

SEQ ID NO: 2955 - protein, 1092 aa, Artificial Sequence
  Synthetic Polypeptide
MLLLLVPVLEVIFTLGGTRAQSVTQLGSHVSVSEGALVLLRCNYSSSVPPYLFWYVQYPNQGLQLLLKHTTGATLVKGINGFEAEFKKSETSFHLTKPSAHMSDAAEYFCAVSDSRAAGNKLTFGGGTRVLVKPNIQNPDPAVYQLRDSKSSDKSVCLFTDFDSQTNVSQSKDSDVYITDKTVLDMRSMDFKSNSAVAWSNKSDFACANAFNNSIIPEDTFFPSPESSCDVKLVEKSFETDTNLNFQNLSVIGFRILLLKVAGFNLLMTLRLWSSRAKRSGSGATNFSLLKQAGDVEENPGPTSMGIRLLCRVAFCFLAVGLVDVKVTQSSRYLVKRTGEKVFLECVQDMDHENMFWYRQDPGLGLRLIYFSYDVKMKEKGDIPEGYSVSREKKERFSLILESASTNQTSMYLCASRFPGTAYNSPLHFGNGTRLTVTEDLNKVFPPEVAVFEPSEAEISHTQKATLVCLATGFFPDHVELSWWVNGKEVHSGVSTDPQPLKEQPALNDSRYCLSSRLRVSATFWQNPRNHFRCQVQFYGLSENDEWTQDRAKPVTQIVSAEAWGRADCGFTSVSYQQGVLSATILYEILLGKATLYAVLVSALVLMAMVKRKDFRAKRSGSGVKQTLNFDLLKLAGDVESNPGPSRGHMEQRGQNAPAASGARKRHGPGPREARGARPGPRVPKTLVLVVAAVLLLVSAESALITQQDLAPQQRAAPQQKRSSPSEGLCPPGHHISEDGRDCISCKYGQDYSTHWNDLLFCLRCTRCDSGEVELSPCTTTRNTVCQCEEGTFREEDSPEMCRKCRTGCPRGMVKVGDCTPWSDIECVHKESGTKHSGEVPAVEETVTSSPGTPASPCSGGSGSCDKTHTCPPCPAPELLGGPSVFLFPPKPKDTLMISRTPEVTCVVVDVSHEDPEVKFNWYVDGVEVHNAKTKPREEQYNSTYRVVSVLTVLHQDWLNGKEYKCKVSNKALPAPIEKTISKAKGQPREPQVYTLPPSRDELTKNQVSLTCLVKGFYPSDIAVEWESNGQPENNYKTTPPVLDSDGSFFLYSKLTVDKSRWQQGNVFSCSVMHEALHNHYTQKSLSLSPGK

SEQ ID NO: 2956 - protein, 6 aa, Artificial Sequence
  Synthetic Polypeptide
GGGGGG

SEQ ID NO: 2957 - protein, 804 aa, Artificial Sequence
  Synthetic Polypeptide
MALPVTALLLPLALLLHAARPDIQMTQTTSSLSASLGDRVTISCRASQDISKYLNWYQQKPDGTVKLLIYHTSRLHSGVPSRFSGSGSGTDYSLTISNLEQEDIATYFCQQGNTLPYTFGGGTKLEITGGGGSGGGGSGGGGSEVKLQESGPGLVAPSQSLSVTCTVSGVSLPDYGVSWIRQPPRKGLEWLGVIWGSETTYYNSALKSRLTIIKDNSKSQVFLKMNSLQTDDTAIYYCAKHYYYGGSYAMDYWGQGTSVTVSSRVEQKLISEEDLAKPTTTPAPRPPTPAPTIASQPLSLRPEACRPAAGGAVHTRGLDFACDIYIWAPLAGTCGVLLLSLVITLYCKRGRKKLLYIFKQPFMRPVQTTQEEDGCSCRFPEEEEGGCELRVKFSRSADAPAYQQGQNQLYNELNLGRREEYDVLDKRRGRDPEMGGKPRRKNPQEGLYNELQKDKMAEAYSEIGMKGERRRGKGHDGLYQGLSTATKDTYDALHMQALPPRSSGSGEGRGSLLTCGDVEENPGPHMEQRGQNAPAASGARKRHGPGPREARGARPGPRVPKTLVLVVAAVLLLVSAESALITQQDLAPQQRAAPQQKRSSPSEGLCPPGHHISEDGRDCISCKYGQDYSTHWNDLLFCLRCTRCDSGEVELSPCTTTRNTVCQCEEGTFREEDSPEMCRKCRTGCPRGMVKVGDCTPWSDIECVHKESGTKHSGEVPAVEETVTSSPGTPASPCSLSGIIIGVTVAAVVLIVAVFVQRRKYRSNKGESPVEPAEPCRYSCPREEEGSTIPIQEDYRKPEPACSP

SEQ ID NO: 2958 - protein, 962 aa, Artificial Sequence
  Synthetic Polypeptide
MALPVTALLLPLALLLHAARPDIQMTQTTSSLSASLGDRVTISCRASQDISKYLNWYQQKPDGTVKLLIYHTSRLHSGVPSRFSGSGSGTDYSLTISNLEQEDIATYFCQQGNTLPYTFGGGTKLEITLEGKPIPNPLLGLDSTGSGEDLKNVFPPEVAVFEPSKAEIAHTQKATLVCLATGFYPDHVELSWWVNGKEVHSGVCTDPQPLKEQPALNDSRYCLSSRLRVSATFWQNPRNHFRCQVQFYGLSENDEWTQDRAKPVTQIVSAEAWGRADCGITSASYHQGVLSATILYEILLGKATLYAVLVSALVLMAMVKRKDSRGRAKRSGSGATNFSLLKQAGDVEENPGPTSMDWIWRILFLVGAATGAHSFEVKLQESGPGLVAPSQSLSVTCTVSGVSLPDYGVSWIRQPPRKGLEWLGVIWGSETTYYNSALKSRLTIIKDNSKSQVFLKMNSLQTDDTAIYYCAKHYYYGGSYAMDYWGQGTSVTVSSTREQKLISEEDGSGIQNPDPAVYQLRDSKSSDKSVCLFTDFDSQTNVSQSKDSDVYITDKCVLDMRSMDFKSNSAVAWSNKSDFACANAFNNSIIPEDTFFPSSDVPCDVKLVEKSFETDTNLNFQNLSVIGFRILLLKVAGFNLLMTLRLWSSRAKRSGSGVKQTLNFDLLKLAGDVESNPGPSRGHMEQRGQNAPAASGARKRHGPGPREARGARPGPRVPKTLVLVVAAVLLLVSAESALITQQDLAPQQRAAPQQKRSSPSEGLCPPGHHISEDGRDCISCKYGQDYSTHWNDLLFCLRCTRCDSGEVELSPCTTTRNTVCQCEEGTFREEDSPEMCRKCRTGCPRGMVKVGDCTPWSDIECVHKESGTKHSGEVPAVEETVTSSPGTPASPCSLSGIIIGVTVAAVVLIVAVFVQRRKYRSNKGESPVEPAEPCRYSCPREEEGSTIPIQEDYRKPEPACSP

SEQ ID NO: 2959 - protein, 768 aa, Artificial Sequence
  Synthetic Polypeptide
MALPVTALLLPLALLLHAARPDIQMTQTTSSLSASLGDRVTISCRASQDISKYLNWYQQKPDGTVKLLIYHTSRLHSGVPSRFSGSGSGTDYSLTISNLEQEDIATYFCQQGNTLPYTFGGGTKLEITGGGGSGGGGSGGGGSEVKLQESGPGLVAPSQSLSVTCTVSGVSLPDYGVSWIRQPPRKGLEWLGVIWGSETTYYNSALKSRLTIIKDNSKSQVFLKMNSLQTDDTAIYYCAKHYYYGGSYAMDYWGQGTSVTVSSRVEQKLISEEDLAKPTTTPAPRPPTPAPTIASQPLSLRPEACRPAAGGAVHTRGLDFACDIYIWAPLAGTCGVLLLSLVITLYCGRARVKFSRSADAPAYQQGQNQLYNELNLGRREEYDVLDKRRGRDPEMGGKPRRKNPQEGLYNELQKDKMAEAYSEIGMKGERRRGKGHDGLYQGLSTATKDTYDALHMQALPPRSRGSGATNFSLLKQAGDVEENPGPGIHMEQRGQNAPAASGARKRHGPGPREARGARPGPRVPKTLVLVVAAVLLLVSAESALITQQDLAPQQRAAPQQKRSSPSEGLCPPGHHISEDGRDCISCKYGQDYSTHWNDLLFCLRCTRCDSGEVELSPCTTTRNTVCQCEEGTFREEDSPEMCRKCRTGCPRGMVKVGDCTPWSDIECVHKESGTKHSGEVPAVEETVTSSPGTPASPCSLSGIIIGVTVAAVVLIVAVFVQRRKYRSNKGESPVEPAEPCRYSCPREEEGSTIPIQEDYRKPEPACSP

SEQ ID NO: 2960 - protein, 756 aa, Artificial Sequence
  Synthetic Polypeptide
MALPVTALLLPLALLLHAARPDIQMTQTTSSLSASLGDRVTISCRASQDISKYLNWYQQKPDGTVKLLIYHTSRLHSGVPSRFSGSGSGTDYSLTISNLEQEDIATYFCQQGNTLPYTFGGGTKLEITGGGGSGGGGSGGGGSEVKLQESGPGLVAPSQSLSVTCTVSGVSLPDYGVSWIRQPPRKGLEWLGVIWGSETTYYNSALKSRLTIIKDNSKSQVFLKMNSLQTDDTAIYYCAKHYYYGGSYAMDYWGQGTSVTVSSRVDGNEEMGGITQTPYKVSISGTTVILTCPQYPGSEILWQHNDKNIGGDEDDKNIGSDEDHLSLKEFSELEQSGYYVCYPRGSKPEDANFYLYLRARVCENCMEMDVMSVATIVIVDICITGGLLLLVYYWSKNRKAKAKPVTRGAGAGGRQRGQNKERPPPVPNPDYEPIRKGQRDLYSGLNQRRISRGSGATNFSLLKQAGDVEENPGPGIHMEQRGQNAPAASGARKRHGPGPREARGARPGPRVPKTLVLVVAAVLLLVSAESALITQQDLAPQQRAAPQQKRSSPSEGLCPPGHHISEDGRDCISCKYGQDYSTHWNDLLFCLRCTRCDSGEVELSPCTTTRNTVCQCEEGTFREEDSPEMCRKCRTGCPRGMVKVGDCTPWSDIECVHKESGTKHSGEVPAVEETVTSSPGTPASPCSLSGIIIGVTVAAVVLIVAVFVQRRKYRSNKGESPVEPAEPCRYSCPREEEGSTIPIQEDYRKPEPACSP

SEQ ID NO: 2961 - protein, 721 aa, Artificial Sequence
  Synthetic Polypeptide
MALPVTALLLPLALLLHAARPDIQMTQTTSSLSASLGDRVTISCRASQDISKYLNWYQQKPDGTVKLLIYHTSRLHSGVPSRFSGSGSGTDYSLTISNLEQEDIATYFCQQGNTLPYTFGGGTKLEITGGGGSGGGGSGGGGSEVKLQESGPGLVAPSQSLSVTCTVSGVSLPDYGVSWIRQPPRKGLEWLGVIWGSETTYYNSALKSRLTIIKDNSKSQVFLKMNSLQTDDTAIYYCAKHYYYGGSYAMDYWGQGTSVTVSSRVFKIPIEELEDRVFVNCNTSITWVEGTVGTLLSDITRLDLGKRILDPRGIYRCNGTDIYKDKESTVQVHYRMCQSCVELDPATVAGIIVTDVIATLLLALGVFCFAGHETGRLSGAADTQALLRNDQVYQPLRDRDDAQYSHLGGNWARNKSRGSGATNFSLLKQAGDVEENPGPGIHMEQRGQNAPAASGARKRHGPGPREARGARPGPRVPKTLVLVVAAVLLLVSAESALITQQDLAPQQRAAPQQKRSSPSEGLCPPGHHISEDGRDCISCKYGQDYSTHWNDLLFCLRCTRCDSGEVELSPCTTTRNTVCQCEEGTFREEDSPEMCRKCRTGCPRGMVKVGDCTPWSDIECVHKESGTKHSGEVPAVEETVTSSPGTPASPCSLSGIIIGVTVAAVVLIVAVFVQRRKYRSNKGESPVEPAEPCRYSCPREEEGSTIPIQEDYRKPEPACSP

SEQ ID NO: 2962 - protein, 731 aa, Artificial Sequence
  Synthetic Polypeptide
MALPVTALLLPLALLLHAARPDIQMTQTTSSLSASLGDRVTISCRASQDISKYLNWYQQKPDGTVKLLIYHTSRLHSGVPSRFSGSGSGTDYSLTISNLEQEDIATYFCQQGNTLPYTFGGGTKLEITGGGGSGGGGSGGGGSEVKLQESGPGLVAPSQSLSVTCTVSGVSLPDYGVSWIRQPPRKGLEWLGVIWGSETTYYNSALKSRLTIIKDNSKSQVFLKMNSLQTDDTAIYYCAKHYYYGGSYAMDYWGQGTSVTVSSRVQSIKGNHLVKVYDYQEDGSVLLTCDAEAKNITWFKDGKMIGFLTEDKKKWNLGSNAKDPRGMYQCKGSQNKSKPLQVYYRMCQNCIELNAATISGFLFAEIVSIFVLAVGVYFIAGQDGVRQSRASDKQTLLPNDQLYQPLKDREDDQYSHLQGNQLRRNSRGSGATNFSLLKQAGDVEENPGPGIHMEQRGQNAPAASGARKRHGPGPREARGARPGPRVPKTLVLVVAAVLLLVSAESALITQQDLAPQQRAAPQQKRSSPSEGLCPPGHHISEDGRDCISCKYGQDYSTHWNDLLFCLRCTRCDSGEVELSPCTTTRNTVCQCEEGTFREEDSPEMCRKCRTGCPRGMVKVGDCTPWSDIECVHKESGTKHSGEVPAVEETVTSSPGTPASPCSLSGIIIGVTVAAVVLIVAVFVQRRKYRSNKGESPVEPAEPCRYSCPREEEGSTIPIQEDYRKPEPACSP

SEQ ID NO: 2963 - protein, 714 aa, Artificial Sequence
  Synthetic Polypeptide
MALPVTALLLPLALLLHAARPDIQMTQTTSSLSASLGDRVTISCRASQDISKYLNWYQQKPDGTVKLLIYHTSRLHSGVPSRFSGSGSGTDYSLTISNLEQEDIATYFCQQGNTLPYTFGGGTKLEITGGGGSGGGGSGGGGSEVKLQESGPGLVAPSQSLSVTCTVSGVSLPDYGVSWIRQPPRKGLEWLGVIWGSETTYYNSALKSRLTIIKDNSKSQVFLKMNSLQTDDTAIYYCAKHYYYGGSYAMDYWGQGTSVTVSSRVQSFGLLDPKLCYLLDGILFIYGVILTALFLRVKFSRSADAPAYQQGQNQLYNELNLGRREEYDVLDKRRGRDPEMGGKPQRRKNPQEGLYNELQKDKMAEAYSEIGMKGERRRGKGHDGLYQGLSTATKDTYDALHMQALPPRSRGSGATNFSLLKQAGDVEENPGPGIHMEQRGQNAPAASGARKRHGPGPREARGARPGPRVPKTLVLVVAAVLLLVSAESALITQQDLAPQQRAAPQQKRSSPSEGLCPPGHHISEDGRDCISCKYGQDYSTHWNDLLFCLRCTRCDSGEVELSPCTTTRNTVCQCEEGTFREEDSPEMCRKCRTGCPRGMVKVGDCTPWSDIECVHKESGTKHSGEVPAVEETVTSSPGTPASPCSLSGIIIGVTVAAVVLIVAVFVQRRKYRSNKGESPVEPAEPCRYSCPREEEGSTIPIQEDYRKPEPACSP

SEQ ID NO: 2964 - protein, 936 aa, Artificial Sequence
  Synthetic Polypeptide
MALPVTALLLPLALLLHAARPDIQMTQTTSSLSASLGDRVTISCRASQDISKYLNWYQQKPDGTVKLLIYHTSRLHSGVPSRFSGSGSGTDYSLTISNLEQEDIATYFCQQGNTLPYTFGGGTKLEITLEGQPKANPTVTLFPPSSEELQANKATLVCLISDFYPGAVTVAWKADGSPVKAGVETTKPSKQSNNKYAASSYLSLTPEQWKSHRSYSCQVTHEGSTVEKTVAPTECSGRADCGITSASYHQGVLSATILYEILLGKATLYAVLVSALVLMAMVKRKDSRGRAKRSGSGATNFSLLKQAGDVEENPGPTSMDWIWRILFLVGAATGAHSFEVKLQESGPGLVAPSQSLSVTCTVSGVSLPDYGVSWIRQPPRKGLEWLGVIWGSETTYYNSALKSRLTIIKDNSKSQVFLKMNSLQTDDTAIYYCAKHYYYGGSYAMDYWGQGTSVTVSSTRASTKGPSVFPLAPSSKSTSGGTAALGCLVKDYFPEPVTVSWNSGALTSGVHTFPAVLQSSGLYSLSSVVTVPSSSLGTQTYICNVNHKPSNTKVDKRVEPKSCIPEDTFFPSSDVPCDVKLVEKSFETDTNLNFQNLSVIGFRILLLKVAGFNLLMTLRLWSSRAKRSGSGVKQTLNFDLLKLAGDVESNPGPSRGHMEQRGQNAPAASGARKRHGPGPREARGARPGPRVPKTLVLVVAAVLLLVSAESALITQQDLAPQQRAAPQQKRSSPSEGLCPPGHHISEDGRDCISCKYGQDYSTHWNDLLFCLRCTRCDSGEVELSPCTTTRNTVCQCEEGTFREEDSPEMCRKCRTGCPRGMVKVGDCTPWSDIECVHKESGTKHSGEVPAVEETVTSSPGTPASPCSLSGIIIGVTVAAVVLIVAVFVQRRKYRSNKGESPVEPAEPCRYSCPREEEGSTIPIQEDYRKPEPACSP

SEQ ID NO: 2965 - protein, 958 aa, Artificial Sequence
  Synthetic Polypeptide
MALPVTALLLPLALLLHAARPDIQMTQTTSSLSASLGDRVTISCRASQDISKYLNWYQQKPDGTVKLLIYHTSRLHSGVPSRFSGSGSGTDYSLTISNLEQEDIATYFCQQGNTLPYTFGGGTKLEITLEGQPKANPTVTLFPPSSEELQANKATLVCLISDFYPGAVTVAWKADGSPVKAGVETTKPSKQSNNKYAASSYLSLTPEQWKSHRSYSCQVTHEGSTVEKTVAPTECSPIKTDVITMDPKDNCSKDANDTLLLQLTNTSAYYMYLLLLLKSVVYFAIITCCLLRRTAFCCNGEKSRAKRSGSGATNFSLLKQAGDVEENPGPTSMDWIWRILFLVGAATGAHSFEVKLQESGPGLVAPSQSLSVTCTVSGVSLPDYGVSWIRQPPRKGLEWLGVIWGSETTYYNSALKSRLTIIKDNSKSQVFLKMNSLQTDDTAIYYCAKHYYYGGSYAMDYWGQGTSVTVSSTRASTKGPSVFPLAPSSKSTSGGTAALGCLVKDYFPEPVTVSWNSGALTSGVHTFPAVLQSSGLYSLSSVVTVPSSSLGTQTYICNVNHKPSNTKVDKRVEPKSCEVKTDSTDHVKPKETENTKQPSKSCHKPKAIVHTEKVNMMSLTVLGLRMLFAKTVAVNFLLTAKLFFLRAKRSGSGVKQTLNFDLLKLAGDVESNPGPSRGHMEQRGQNAPAASGARKRHGPGPREARGARPGPRVPKTLVLVVAAVLLLVSAESALITQQDLAPQQRAAPQQKRSSPSEGLCPPGHHISEDGRDCISCKYGQDYSTHWNDLLFCLRCTRCDSGEVELSPCTTTRNTVCQCEEGTFREEDSPEMCRKCRTGCPRGMVKVGDCTPWSDIECVHKESGTKHSGEVPAVEETVTSSPGTPASPCSLSGIIIGVTVAAVVLIVAVFVQRRKYRSNKGESPVEPAEPCRYSCPREEEGSTIPIQEDYRKPEPACSP

SEQ ID NO: 2966 - protein, 925 aa, Artificial Sequence
  Synthetic Polypeptide
MALPVTALLLPLALLLHAARPNAGVTQTPKFQVLKTGQSMTLQCAQDMNHEYMSWYRQDPGMGLRLIHYSVAIQTTDQGEVPNGYNVSRSTIEDFPLRLLSAAPSQTSVYFCASSYLGNTGELFFGEGSRLTVEDLKNVFPPEVAVFEPSKAEIAHTQKATLVCLATGFYPDHVELSWWVNGKEVHSGVCTDPQPLKEQPALNDSRYCLSSRLRVSATFWQNPRNHFRCQVQFYGLSENDEWTQDRAKPVTQIVSAEAWGRADCGITSASYHQGVLSATILYEILLGKATLYAVLVSALVLMAMVKRKDSRGRAKRSGSGATNFSLLKQAGDVEENPGPTSMDWIWRILFLVGAATGAHSNAGVTQTPKFQVLKTGQSMTLQCAQDMNHEYMSWYRQDPGMGLRLIHYSVAIQTTDQGEVPNGYNVSRSTIEDFPLRLLSAAPSQTSVYFCASSYLGNTGELFFGEGSRLTVIQNPDPAVYQLRDSKSSDKSVCLFTDFDSQTNVSQSKDSDVYITDKCVLDMRSMDFKSNSAVAWSNKSDFACANAFNNSIIPEDTFFPSSDVPCDVKLVEKSFETDTNLNFQNLSVIGFRILLLKVAGFNLLMTLRLWSSRAKRSGSGVKQTLNFDLLKLAGDVESNPGPSRGHMEQRGQNAPAASGARKRHGPGPREARGARPGPRVPKTLVLVVAAVLLLVSAESALITQQDLAPQQRAAPQQKRSSPSEGLCPPGHHISEDGRDCISCKYGQDYSTHWNDLLFCLRCTRCDSGEVELSPCTTTRNTVCQCEEGTFREEDSPEMCRKCRTGCPRGMVKVGDCTPWSDIECVHKESGTKHSGEVPAVEETVTSSPGTPASPCSLSGIIIGVTVAAVVLIVAVFVQRRKYRSNKGESPVEPAEPCRYSCPREEEGSTIPIQEDYRKPEPACSP

SEQ ID NO: 2967 - protein, 928 aa, Artificial Sequence
  Synthetic Polypeptide
MLLLLVPVLEVIFTLGGTRAQSVTQLGSHVSVSEGALVLLRCNYSSSVPPYLFWYVQYPNQGLQLLLKHTTGATLVKGINGFEAEFKKSETSFHLTKPSAHMSDAAEYFCAVSDSRAAGNKLTFGGGTRVLVKPNIQNPDPAVYQLRDSKSSDKSVCLFTDFDSQTNVSQSKDSDVYITDKTVLDMRSMDFKSNSAVAWSNKSDFACANAFNNSIIPEDTFFPSPESSCDVKLVEKSFETDTNLNFQNLSVIGFRILLLKVAGFNLLMTLRLWSSRAKRSGSGATNFSLLKQAGDVEENPGPTSMGIRLLCRVAFCFLAVGLVDVKVTQSSRYLVKRTGEKVFLECVQDMDHENMFWYRQDPGLGLRLIYFSYDVKMKEKGDIPEGYSVSREKKERFSLILESASTNQTSMYLCASRFPGTAYNSPLHFGNGTRLTVTEDLNKVFPPEVAVFEPSEAEISHTQKATLVCLATGFFPDHVELSWWVNGKEVHSGVSTDPQPLKEQPALNDSRYCLSSRLRVSATFWQNPRNHFRCQVQFYGLSENDEWTQDRAKPVTQIVSAEAWGRADCGFTSVSYQQGVLSATILYEILLGKATLYAVLVSALVLMAMVKRKDFRAKRSGSGVKQTLNFDLLKLAGDVESNPGPSRGHMEQRGQNAPAASGARKRHGPGPREARGARPGPRVPKTLVLVVAAVLLLVSAESALITQQDLAPQQRAAPQQKRSSPSEGLCPPGHHISEDGRDCISCKYGQDYSTHWNDLLFCLRCTRCDSGEVELSPCTTTRNTVCQCEEGTFREEDSPEMCRKCRTGCPRGMVKVGDCTPWSDIECVHKESGTKHSGEVPAVEETVTSSPGTPASPCSLSGIIIGVTVAAVVLIVAVFVQRRKYRSNKGESPVEPAEPCRYSCPREEEGSTIPIQEDYRKPEPACSP

SEQ ID NO: 2968 - protein, 6 aa, Artificial Sequence
  Synthetic Polypeptide
GGGGGG

SEQ ID NO: 2969 - protein, 797 aa, Artificial Sequence
  Synthetic Polypeptide
MALPVTALLLPLALLLHAARPDIQMTQTTSSLSASLGDRVTISCRASQDISKYLNWYQQKPDGTVKLLIYHTSRLHSGVPSRFSGSGSGTDYSLTISNLEQEDIATYFCQQGNTLPYTFGGGTKLEITGGGGSGGGGSGGGGSEVKLQESGPGLVAPSQSLSVTCTVSGVSLPDYGVSWIRQPPRKGLEWLGVIWGSETTYYNSALKSRLTIIKDNSKSQVFLKMNSLQTDDTAIYYCAKHYYYGGSYAMDYWGQGTSVTVSSRVEQKLISEEDLAKPTTTPAPRPPTPAPTIASQPLSLRPEACRPAAGGAVHTRGLDFACDIYIWAPLAGTCGVLLLSLVITLYCKRGRKKLLYIFKQPFMRPVQTTQEEDGCSCRFPEEEEGGCELRVKFSRSADAPAYQQGQNQLYNELNLGRREEYDVLDKRRGRDPEMGGKPRRKNPQEGLYNELQKDKMAEAYSEIGMKGERRRGKGHDGLYQGLSTATKDTYDALHMQALPPRSSGSGEGRGSLLTCGDVEENPGPHMEQRGQNAPAASGARKRHGPGPREARGARPGPRVPKTLVLVVAAVLLLVSAESALITQQDLAPQQRAAPQQKRSSPSEGLCPPGHHISEDGRDCISCKYGQDYSTHWNDLLFCLRCTRCDSGEVELSPCTTTRNTVCQCEEGTFREEDSPEMCRKCRTGCPRGMVKVGDCTPWSDIECVHKESGTKHSGEVPAVEETVTSSPGTPASPCSLSGIIIGVTVAAVVLIVAVFVRSKRSRLLHSDYMNMTPRRPGPTRKHYQPYAPPRDFAAYRS

SEQ ID NO: 2970 - protein, 955 aa, Artificial Sequence
  Synthetic Polypeptide
MALPVTALLLPLALLLHAARPDIQMTQTTSSLSASLGDRVTISCRASQDISKYLNWYQQKPDGTVKLLIYHTSRLHSGVPSRFSGSGSGTDYSLTISNLEQEDIATYFCQQGNTLPYTFGGGTKLEITLEGKPIPNPLLGLDSTGSGEDLKNVFPPEVAVFEPSKAEIAHTQKATLVCLATGFYPDHVELSWWVNGKEVHSGVCTDPQPLKEQPALNDSRYCLSSRLRVSATFWQNPRNHFRCQVQFYGLSENDEWTQDRAKPVTQIVSAEAWGRADCGITSASYHQGVLSATILYEILLGKATLYAVLVSALVLMAMVKRKDSRGRAKRSGSGATNFSLLKQAGDVEENPGPTSMDWIWRILFLVGAATGAHSFEVKLQESGPGLVAPSQSLSVTCTVSGVSLPDYGVSWIRQPPRKGLEWLGVIWGSETTYYNSALKSRLTIIKDNSKSQVFLKMNSLQTDDTAIYYCAKHYYYGGSYAMDYWGQGTSVTVSSTREQKLISEEDGSGIQNPDPAVYQLRDSKSSDKSVCLFTDFDSQTNVSQSKDSDVYITDKCVLDMRSMDFKSNSAVAWSNKSDFACANAFNNSIIPEDTFFPSSDVPCDVKLVEKSFETDTNLNFQNLSVIGFRILLLKVAGFNLLMTLRLWSSRAKRSGSGVKQTLNFDLLKLAGDVESNPGPSRGHMEQRGQNAPAASGARKRHGPGPREARGARPGPRVPKTLVLVVAAVLLLVSAESALITQQDLAPQQRAAPQQKRSSPSEGLCPPGHHISEDGRDCISCKYGQDYSTHWNDLLFCLRCTRCDSGEVELSPCTTTRNTVCQCEEGTFREEDSPEMCRKCRTGCPRGMVKVGDCTPWSDIECVHKESGTKHSGEVPAVEETVTSSPGTPASPCSLSGIIIGVTVAAVVLIVAVFVRSKRSRLLHSDYMNMTPRRPGPTRKHYQPYAPPRDFAAYRS

SEQ ID NO: 2971 - protein, 761 aa, Artificial Sequence
  Synthetic Polypeptide
MALPVTALLLPLALLLHAARPDIQMTQTTSSLSASLGDRVTISCRASQDISKYLNWYQQKPDGTVKLLIYHTSRLHSGVPSRFSGSGSGTDYSLTISNLEQEDIATYFCQQGNTLPYTFGGGTKLEITGGGGSGGGGSGGGGSEVKLQESGPGLVAPSQSLSVTCTVSGVSLPDYGVSWIRQPPRKGLEWLGVIWGSETTYYNSALKSRLTIIKDNSKSQVFLKMNSLQTDDTAIYYCAKHYYYGGSYAMDYWGQGTSVTVSSRVEQKLISEEDLAKPTTTPAPRPPTPAPTIASQPLSLRPEACRPAAGGAVHTRGLDFACDIYIWAPLAGTCGVLLLSLVITLYCGRARVKFSRSADAPAYQQGQNQLYNELNLGRREEYDVLDKRRGRDPEMGGKPRRKNPQEGLYNELQKDKMAEAYSEIGMKGERRRGKGHDGLYQGLSTATKDTYDALHMQALPPRSRGSGATNFSLLKQAGDVEENPGPGIHMEQRGQNAPAASGARKRHGPGPREARGARPGPRVPKTLVLVVAAVLLLVSAESALITQQDLAPQQRAAPQQKRSSPSEGLCPPGHHISEDGRDCISCKYGQDYSTHWNDLLFCLRCTRCDSGEVELSPCTTTRNTVCQCEEGTFREEDSPEMCRKCRTGCPRGMVKVGDCTPWSDIECVHKESGTKHSGEVPAVEETVTSSPGTPASPCSLSGIIIGVTVAAVVLIVAVFVRSKRSRLLHSDYMNMTPRRPGPTRKHYQPYAPPRDFAAYRS

SEQ ID NO: 2972 - protein, 749 aa, Artificial Sequence
  Synthetic Polypeptide
MALPVTALLLPLALLLHAARPDIQMTQTTSSLSASLGDRVTISCRASQDISKYLNWYQQKPDGTVKLLIYHTSRLHSGVPSRFSGSGSGTDYSLTISNLEQEDIATYFCQQGNTLPYTFGGGTKLEITGGGGSGGGGSGGGGSEVKLQESGPGLVAPSQSLSVTCTVSGVSLPDYGVSWIRQPPRKGLEWLGVIWGSETTYYNSALKSRLTIIKDNSKSQVFLKMNSLQTDDTAIYYCAKHYYYGGSYAMDYWGQGTSVTVSSRVDGNEEMGGITQTPYKVSISGTTVILTCPQYPGSEILWQHNDKNIGGDEDDKNIGSDEDHLSLKEFSELEQSGYYVCYPRGSKPEDANFYLYLRARVCENCMEMDVMSVATIVIVDICITGGLLLLVYYWSKNRKAKAKPVTRGAGAGGRQRGQNKERPPPVPNPDYEPIRKGQRDLYSGLNQRRISRGSGATNFSLLKQAGDVEENPGPGIHMEQRGQNAPAASGARKRHGPGPREARGARPGPRVPKTLVLVVAAVLLLVSAESALITQQDLAPQQRAAPQQKRSSPSEGLCPPGHHISEDGRDCISCKYGQDYSTHWNDLLFCLRCTRCDSGEVELSPCTTTRNTVCQCEEGTFREEDSPEMCRKCRTGCPRGMVKVGDCTPWSDIECVHKESGTKHSGEVPAVEETVTSSPGTPASPCSLSGIIIGVTVAAVVLIVAVFVRSKRSRLLHSDYMNMTPRRPGPTRKHYQPYAPPRDFAAYRS

SEQ ID NO: 2973 - protein, 714 aa, Artificial Sequence
  Synthetic Polypeptide
MALPVTALLLPLALLLHAARPDIQMTQTTSSLSASLGDRVTISCRASQDISKYLNWYQQKPDGTVKLLIYHTSRLHSGVPSRFSGSGSGTDYSLTISNLEQEDIATYFCQQGNTLPYTFGGGTKLEITGGGGSGGGGSGGGGSEVKLQESGPGLVAPSQSLSVTCTVSGVSLPDYGVSWIRQPPRKGLEWLGVIWGSETTYYNSALKSRLTIIKDNSKSQVFLKMNSLQTDDTAIYYCAKHYYYGGSYAMDYWGQGTSVTVSSRVFKIPIEELEDRVFVNCNTSITWVEGTVGTLLSDITRLDLGKRILDPRGIYRCNGTDIYKDKESTVQVHYRMCQSCVELDPATVAGIIVTDVIATLLLALGVFCFAGHETGRLSGAADTQALLRNDQVYQPLRDRDDAQYSHLGGNWARNKSRGSGATNFSLLKQAGDVEENPGPGIHMEQRGQNAPAASGARKRHGPGPREARGARPGPRVPKTLVLVVAAVLLLVSAESALITQQDLAPQQRAAPQQKRSSPSEGLCPPGHHISEDGRDCISCKYGQDYSTHWNDLLFCLRCTRCDSGEVELSPCTTTRNTVCQCEEGTFREEDSPEMCRKCRTGCPRGMVKVGDCTPWSDIECVHKESGTKHSGEVPAVEETVTSSPGTPASPCSLSGIIIGVTVAAVVLIVAVFVRSKRSRLLHSDYMNMTPRRPGPTRKHYQPYAPPRDFAAYRS

SEQ ID NO: 2974 - protein, 724 aa, Artificial Sequence
  Synthetic Polypeptide
MALPVTALLLPLALLLHAARPDIQMTQTTSSLSASLGDRVTISCRASQDISKYLNWYQQKPDGTVKLLIYHTSRLHSGVPSRFSGSGSGTDYSLTISNLEQEDIATYFCQQGNTLPYTFGGGTKLEITGGGGSGGGGSGGGGSEVKLQESGPGLVAPSQSLSVTCTVSGVSLPDYGVSWIRQPPRKGLEWLGVIWGSETTYYNSALKSRLTIIKDNSKSQVFLKMNSLQTDDTAIYYCAKHYYYGGSYAMDYWGQGTSVTVSSRVQSIKGNHLVKVYDYQEDGSVLLTCDAEAKNITWFKDGKMIGFLTEDKKKWNLGSNAKDPRGMYQCKGSQNKSKPLQVYYRMCQNCIELNAATISGFLFAEIVSIFVLAVGVYFIAGQDGVRQSRASDKQTLLPNDQLYQPLKDREDDQYSHLQGNQLRRNSRGSGATNFSLLKQAGDVEENPGPGIHMEQRGQNAPAASGARKRHGPGPREARGARPGPRVPKTLVLVVAAVLLLVSAESALITQQDLAPQQRAAPQQKRSSPSEGLCPPGHHISEDGRDCISCKYGQDYSTHWNDLLFCLRCTRCDSGEVELSPCTTTRNTVCQCEEGTFREEDSPEMCRKCRTGCPRGMVKVGDCTPWSDIECVHKESGTKHSGEVPAVEETVTSSPGTPASPCSLSGIIIGVTVAAVVLIVAVFVRSKRSRLLHSDYMNMTPRRPGPTRKHYQPYAPPRDFAAYRS

SEQ ID NO: 2975 - protein, 707 aa, Artificial Sequence
  Synthetic Polypeptide
MALPVTALLLPLALLLHAARPDIQMTQTTSSLSASLGDRVTISCRASQDISKYLNWYQQKPDGTVKLLIYHTSRLHSGVPSRFSGSGSGTDYSLTISNLEQEDIATYFCQQGNTLPYTFGGGTKLEITGGGGSGGGGSGGGGSEVKLQESGPGLVAPSQSLSVTCTVSGVSLPDYGVSWIRQPPRKGLEWLGVIWGSETTYYNSALKSRLTIIKDNSKSQVFLKMNSLQTDDTAIYYCAKHYYYGGSYAMDYWGQGTSVTVSSRVQSFGLLDPKLCYLLDGILFIYGVILTALFLRVKFSRSADAPAYQQGQNQLYNELNLGRREEYDVLDKRRGRDPEMGGKPQRRKNPQEGLYNELQKDKMAEAYSEIGMKGERRRGKGHDGLYQGLSTATKDTYDALHMQALPPRSRGSGATNFSLLKQAGDVEENPGPGIHMEQRGQNAPAASGARKRHGPGPREARGARPGPRVPKTLVLVVAAVLLLVSAESALITQQDLAPQQRAAPQQKRSSPSEGLCPPGHHISEDGRDCISCKYGQDYSTHWNDLLFCLRCTRCDSGEVELSPCTTTRNTVCQCEEGTFREEDSPEMCRKCRTGCPRGMVKVGDCTPWSDIECVHKESGTKHSGEVPAVEETVTSSPGTPASPCSLSGIIIGVTVAAVVLIVAVFVRSKRSRLLHSDYMNMTPRRPGPTRKHYQPYAPPRDFAAYRS

SEQ ID NO: 2976 - protein, 929 aa, Artificial Sequence
  Synthetic Polypeptide
MALPVTALLLPLALLLHAARPDIQMTQTTSSLSASLGDRVTISCRASQDISKYLNWYQQKPDGTVKLLIYHTSRLHSGVPSRFSGSGSGTDYSLTISNLEQEDIATYFCQQGNTLPYTFGGGTKLEITLEGQPKANPTVTLFPPSSEELQANKATLVCLISDFYPGAVTVAWKADGSPVKAGVETTKPSKQSNNKYAASSYLSLTPEQWKSHRSYSCQVTHEGSTVEKTVAPTECSGRADCGITSASYHQGVLSATILYEILLGKATLYAVLVSALVLMAMVKRKDSRGRAKRSGSGATNFSLLKQAGDVEENPGPTSMDWIWRILFLVGAATGAHSFEVKLQESGPGLVAPSQSLSVTCTVSGVSLPDYGVSWIRQPPRKGLEWLGVIWGSETTYYNSALKSRLTIIKDNSKSQVFLKMNSLQTDDTAIYYCAKHYYYGGSYAMDYWGQGTSVTVSSTRASTKGPSVFPLAPSSKSTSGGTAALGCLVKDYFPEPVTVSWNSGALTSGVHTFPAVLQSSGLYSLSSVVTVPSSSLGTQTYICNVNHKPSNTKVDKRVEPKSCIPEDTFFPSSDVPCDVKLVEKSFETDTNLNFQNLSVIGFRILLLKVAGFNLLMTLRLWSSRAKRSGSGVKQTLNFDLLKLAGDVESNPGPSRGHMEQRGQNAPAASGARKRHGPGPREARGARPGPRVPKTLVLVVAAVLLLVSAESALITQQDLAPQQRAAPQQKRSSPSEGLCPPGHHISEDGRDCISCKYGQDYSTHWNDLLFCLRCTRCDSGEVELSPCTTTRNTVCQCEEGTFREEDSPEMCRKCRTGCPRGMVKVGDCTPWSDIECVHKESGTKHSGEVPAVEETVTSSPGTPASPCSLSGIIIGVTVAAVVLIVAVFVRSKRSRLLHSDYMNMTPRRPGPTRKHYQPYAPPRDFAAYRS

SEQ ID NO: 2977 - protein, 951 aa, Artificial Sequence
  Synthetic Polypeptide
MALPVTALLLPLALLLHAARPDIQMTQTTSSLSASLGDRVTISCRASQDISKYLNWYQQKPDGTVKLLIYHTSRLHSGVPSRFSGSGSGTDYSLTISNLEQEDIATYFCQQGNTLPYTFGGGTKLEITLEGQPKANPTVTLFPPSSEELQANKATLVCLISDFYPGAVTVAWKADGSPVKAGVETTKPSKQSNNKYAASSYLSLTPEQWKSHRSYSCQVTHEGSTVEKTVAPTECSPIKTDVITMDPKDNCSKDANDTLLLQLTNTSAYYMYLLLLLKSVVYFAIITCCLLRRTAFCCNGEKSRAKRSGSGATNFSLLKQAGDVEENPGPTSMDWIWRILFLVGAATGAHSFEVKLQESGPGLVAPSQSLSVTCTVSGVSLPDYGVSWIRQPPRKGLEWLGVIWGSETTYYNSALKSRLTIIKDNSKSQVFLKMNSLQTDDTAIYYCAKHYYYGGSYAMDYWGQGTSVTVSSTRASTKGPSVFPLAPSSKSTSGGTAALGCLVKDYFPEPVTVSWNSGALTSGVHTFPAVLQSSGLYSLSSVVTVPSSSLGTQTYICNVNHKPSNTKVDKRVEPKSCEVKTDSTDHVKPKETENTKQPSKSCHKPKAIVHTEKVNMMSLTVLGLRMLFAKTVAVNFLLTAKLFFLRAKRSGSGVKQTLNFDLLKLAGDVESNPGPSRGHMEQRGQNAPAASGARKRHGPGPREARGARPGPRVPKTLVLVVAAVLLLVSAESALITQQDLAPQQRAAPQQKRSSPSEGLCPPGHHISEDGRDCISCKYGQDYSTHWNDLLFCLRCTRCDSGEVELSPCTTTRNTVCQCEEGTFREEDSPEMCRKCRTGCPRGMVKVGDCTPWSDIECVHKESGTKHSGEVPAVEETVTSSPGTPASPCSLSGIIIGVTVAAVVLIVAVFVRSKRSRLLHSDYMNMTPRRPGPTRKHYQPYAPPRDFAAYRS

SEQ ID NO: 2978 - protein, 918 aa, Artificial Sequence
  Synthetic Polypeptide
MALPVTALLLPLALLLHAARPNAGVTQTPKFQVLKTGQSMTLQCAQDMNHEYMSWYRQDPGMGLRLIHYSVAIQTTDQGEVPNGYNVSRSTIEDFPLRLLSAAPSQTSVYFCASSYLGNTGELFFGEGSRLTVEDLKNVFPPEVAVFEPSKAEIAHTQKATLVCLATGFYPDHVELSWWVNGKEVHSGVCTDPQPLKEQPALNDSRYCLSSRLRVSATFWQNPRNHFRCQVQFYGLSENDEWTQDRAKPVTQIVSAEAWGRADCGITSASYHQGVLSATILYEILLGKATLYAVLVSALVLMAMVKRKDSRGRAKRSGSGATNFSLLKQAGDVEENPGPTSMDWIWRILFLVGAATGAHSNAGVTQTPKFQVLKTGQSMTLQCAQDMNHEYMSWYRQDPGMGLRLIHYSVAIQTTDQGEVPNGYNVSRSTIEDFPLRLLSAAPSQTSVYFCASSYLGNTGELFFGEGSRLTVIQNPDPAVYQLRDSKSSDKSVCLFTDFDSQTNVSQSKDSDVYITDKCVLDMRSMDFKSNSAVAWSNKSDFACANAFNNSIIPEDTFFPSSDVPCDVKLVEKSFETDTNLNFQNLSVIGFRILLLKVAGFNLLMTLRLWSSRAKRSGSGVKQTLNFDLLKLAGDVESNPGPSRGHMEQRGQNAPAASGARKRHGPGPREARGARPGPRVPKTLVLVVAAVLLLVSAESALITQQDLAPQQRAAPQQKRSSPSEGLCPPGHHISEDGRDCISCKYGQDYSTHWNDLLFCLRCTRCDSGEVELSPCTTTRNTVCQCEEGTFREEDSPEMCRKCRTGCPRGMVKVGDCTPWSDIECVHKESGTKHSGEVPAVEETVTSSPGTPASPCSLSGIIIGVTVAAVVLIVAVFVRSKRSRLLHSDYMNMTPRRPGPTRKHYQPYAPPRDFAAYRS

SEQ ID NO: 2979 - protein, 921 aa, Artificial Sequence
  Synthetic Polypeptide
MLLLLVPVLEVIFTLGGTRAQSVTQLGSHVSVSEGALVLLRCNYSSSVPPYLFWYVQYPNQGLQLLLKHTTGATLVKGINGFEAEFKKSETSFHLTKPSAHMSDAAEYFCAVSDSRAAGNKLTFGGGTRVLVKPNIQNPDPAVYQLRDSKSSDKSVCLFTDFDSQTNVSQSKDSDVYITDKTVLDMRSMDFKSNSAVAWSNKSDFACANAFNNSIIPEDTFFPSPESSCDVKLVEKSFETDTNLNFQNLSVIGFRILLLKVAGFNLLMTLRLWSSRAKRSGSGATNFSLLKQAGDVEENPGPTSMGIRLLCRVAFCFLAVGLVDVKVTQSSRYLVKRTGEKVFLECVQDMDHENMFWYRQDPGLGLRLIYFSYDVKMKEKGDIPEGYSVSREKKERFSLILESASTNQTSMYLCASRFPGTAYNSPLHFGNGTRLTVTEDLNKVFPPEVAVFEPSEAEISHTQKATLVCLATGFFPDHVELSWWVNGKEVHSGVSTDPQPLKEQPALNDSRYCLSSRLRVSATFWQNPRNHFRCQVQFYGLSENDEWTQDRAKPVTQIVSAEAWGRADCGFTSVSYQQGVLSATILYEILLGKATLYAVLVSALVLMAMVKRKDFRAKRSGSGVKQTLNFDLLKLAGDVESNPGPSRGHMEQRGQNAPAASGARKRHGPGPREARGARPGPRVPKTLVLVVAAVLLLVSAESALITQQDLAPQQRAAPQQKRSSPSEGLCPPGHHISEDGRDCISCKYGQDYSTHWNDLLFCLRCTRCDSGEVELSPCTTTRNTVCQCEEGTFREEDSPEMCRKCRTGCPRGMVKVGDCTPWSDIECVHKESGTKHSGEVPAVEETVTSSPGTPASPCSLSGIIIGVTVAAVVLIVAVFVRSKRSRLLHSDYMNMTPRRPGPTRKHYQPYAPPRDFAAYRS

SEQ ID NO: 2980 - protein, 6 aa, Artificial Sequence
  Synthetic Polypeptide
GGGGGG

SEQ ID NO: 2981 - protein, 798 aa, Artificial Sequence
  Synthetic Polypeptide
MALPVTALLLPLALLLHAARPDIQMTQTTSSLSASLGDRVTISCRASQDISKYLNWYQQKPDGTVKLLIYHTSRLHSGVPSRFSGSGSGTDYSLTISNLEQEDIATYFCQQGNTLPYTFGGGTKLEITGGGGSGGGGSGGGGSEVKLQESGPGLVAPSQSLSVTCTVSGVSLPDYGVSWIRQPPRKGLEWLGVIWGSETTYYNSALKSRLTIIKDNSKSQVFLKMNSLQTDDTAIYYCAKHYYYGGSYAMDYWGQGTSVTVSSRVEQKLISEEDLAKPTTTPAPRPPTPAPTIASQPLSLRPEACRPAAGGAVHTRGLDFACDIYIWAPLAGTCGVLLLSLVITLYCKRGRKKLLYIFKQPFMRPVQTTQEEDGCSCRFPEEEEGGCELRVKFSRSADAPAYQQGQNQLYNELNLGRREEYDVLDKRRGRDPEMGGKPRRKNPQEGLYNELQKDKMAEAYSEIGMKGERRRGKGHDGLYQGLSTATKDTYDALHMQALPPRSSGSGEGRGSLLTCGDVEENPGPHMEQRGQNAPAASGARKRHGPGPREARGARPGPRVPKTLVLVVAAVLLLVSAESALITQQDLAPQQRAAPQQKRSSPSEGLCPPGHHISEDGRDCISCKYGQDYSTHWNDLLFCLRCTRCDSGEVELSPCTTTRNTVCQCEEGTFREEDSPEMCRKCRTGCPRGMVKVGDCTPWSDIECVHKESGTKHSGEVPAVEETVTSSPGTPASPCSLSGIIIGVTVAAVVLIVAVFVKRGRKKLLYIFKQPFMRPVQTTQEEDGCSCRFPEEEEGGCEL

SEQ ID NO: 2982 - protein, 956 aa, Artificial Sequence
  Synthetic Polypeptide
MALPVTALLLPLALLLHAARPDIQMTQTTSSLSASLGDRVTISCRASQDISKYLNWYQQKPDGTVKLLIYHTSRLHSGVPSRFSGSGSGTDYSLTISNLEQEDIATYFCQQGNTLPYTFGGGTKLEITLEGKPIPNPLLGLDSTGSGEDLKNVFPPEVAVFEPSKAEIAHTQKATLVCLATGFYPDHVELSWWVNGKEVHSGVCTDPQPLKEQPALNDSRYCLSSRLRVSATFWQNPRNHFRCQVQFYGLSENDEWTQDRAKPVTQIVSAEAWGRADCGITSASYHQGVLSATILYEILLGKATLYAVLVSALVLMAMVKRKDSRGRAKRSGSGATNFSLLKQAGDVEENPGPTSMDWIWRILFLVGAATGAHSFEVKLQESGPGLVAPSQSLSVTCTVSGVSLPDYGVSWIRQPPRKGLEWLGVIWGSETTYYNSALKSRLTIIKDNSKSQVFLKMNSLQTDDTAIYYCAKHYYYGGSYAMDYWGQGTSVTVSSTREQKLISEEDGSGIQNPDPAVYQLRDSKSSDKSVCLFTDFDSQTNVSQSKDSDVYITDKCVLDMRSMDFKSNSAVAWSNKSDFACANAFNNSIIPEDTFFPSSDVPCDVKLVEKSFETDTNLNFQNLSVIGFRILLLKVAGFNLLMTLRLWSSRAKRSGSGVKQTLNFDLLKLAGDVESNPGPSRGHMEQRGQNAPAASGARKRHGPGPREARGARPGPRVPKTLVLVVAAVLLLVSAESALITQQDLAPQQRAAPQQKRSSPSEGLCPPGHHISEDGRDCISCKYGQDYSTHWNDLLFCLRCTRCDSGEVELSPCTTTRNTVCQCEEGTFREEDSPEMCRKCRTGCPRGMVKVGDCTPWSDIECVHKESGTKHSGEVPAVEETVTSSPGTPASPCSLSGIIIGVTVAAVVLIVAVFVKRGRKKLLYIFKQPFMRPVQTTQEEDGCSCRFPEEEEGGCEL

SEQ ID NO: 2983 - protein, 762 aa, Artificial Sequence
  Synthetic Polypeptide
MALPVTALLLPLALLLHAARPDIQMTQTTSSLSASLGDRVTISCRASQDISKYLNWYQQKPDGTVKLLIYHTSRLHSGVPSRFSGSGSGTDYSLTISNLEQEDIATYFCQQGNTLPYTFGGGTKLEITGGGGSGGGGSGGGGSEVKLQESGPGLVAPSQSLSVTCTVSGVSLPDYGVSWIRQPPRKGLEWLGVIWGSETTYYNSALKSRLTIIKDNSKSQVFLKMNSLQTDDTAIYYCAKHYYYGGSYAMDYWGQGTSVTVSSRVEQKLISEEDLAKPTTTPAPRPPTPAPTIASQPLSLRPEACRPAAGGAVHTRGLDFACDIYIWAPLAGTCGVLLLSLVITLYCGRARVKFSRSADAPAYQQGQNQLYNELNLGRREEYDVLDKRRGRDPEMGGKPRRKNPQEGLYNELQKDKMAEAYSEIGMKGERRRGKGHDGLYQGLSTATKDTYDALHMQALPPRSRGSGATNFSLLKQAGDVEENPGPGIHMEQRGQNAPAASGARKRHGPGPREARGARPGPRVPKTLVLVVAAVLLLVSAESALITQQDLAPQQRAAPQQKRSSPSEGLCPPGHHISEDGRDCISCKYGQDYSTHWNDLLFCLRCTRCDSGEVELSPCTTTRNTVCQCEEGTFREEDSPEMCRKCRTGCPRGMVKVGDCTPWSDIECVHKESGTKHSGEVPAVEETVTSSPGTPASPCSLSGIIIGVTVAAVVLIVAVFVKRGRKKLLYIFKQPFMRPVQTTQEEDGCSCRFPEEEEGGCEL

SEQ ID NO: 2984 - protein, 750 aa, Artificial Sequence
  Synthetic Polypeptide
MALPVTALLLPLALLLHAARPDIQMTQTTSSLSASLGDRVTISCRASQDISKYLNWYQQKPDGTVKLLIYHTSRLHSGVPSRFSGSGSGTDYSLTISNLEQEDIATYFCQQGNTLPYTFGGGTKLEITGGGGSGGGGSGGGGSEVKLQESGPGLVAPSQSLSVTCTVSGVSLPDYGVSWIRQPPRKGLEWLGVIWGSETTYYNSALKSRLTIIKDNSKSQVFLKMNSLQTDDTAIYYCAKHYYYGGSYAMDYWGQGTSVTVSSRVDGNEEMGGITQTPYKVSISGTTVILTCPQYPGSEILWQHNDKNIGGDEDDKNIGSDEDHLSLKEFSELEQSGYYVCYPRGSKPEDANFYLYLRARVCENCMEMDVMSVATIVIVDICITGGLLLLVYYWSKNRKAKAKPVTRGAGAGGRQRGQNKERPPPVPNPDYEPIRKGQRDLYSGLNQRRISRGSGATNFSLLKQAGDVEENPGPGIHMEQRGQNAPAASGARKRHGPGPREARGARPGPRVPKTLVLVVAAVLLLVSAESALITQQDLAPQQRAAPQQKRSSPSEGLCPPGHHISEDGRDCISCKYGQDYSTHWNDLLFCLRCTRCDSGEVELSPCTTTRNTVCQCEEGTFREEDSPEMCRKCRTGCPRGMVKVGDCTPWSDIECVHKESGTKHSGEVPAVEETVTSSPGTPASPCSLSGIIIGVTVAAVVLIVAVFVKRGRKKLLYIFKQPFMRPVQTTQEEDGCSCRFPEEEEGGCEL

SEQ ID NO: 2985 - protein, 715 aa, Artificial Sequence
  Synthetic Polypeptide
MALPVTALLLPLALLLHAARPDIQMTQTTSSLSASLGDRVTISCRASQDISKYLNWYQQKPDGTVKLLIYHTSRLHSGVPSRFSGSGSGTDYSLTISNLEQEDIATYFCQQGNTLPYTFGGGTKLEITGGGGSGGGGSGGGGSEVKLQESGPGLVAPSQSLSVTCTVSGVSLPDYGVSWIRQPPRKGLEWLGVIWGSETTYYNSALKSRLTIIKDNSKSQVFLKMNSLQTDDTAIYYCAKHYYYGGSYAMDYWGQGTSVTVSSRVFKIPIEELEDRVFVNCNTSITWVEGTVGTLLSDITRLDLGKRILDPRGIYRCNGTDIYKDKESTVQVHYRMCQSCVELDPATVAGIIVTDVIATLLLALGVFCFAGHETGRLSGAADTQALLRNDQVYQPLRDRDDAQYSHLGGNWARNKSRGSGATNFSLLKQAGDVEENPGPGIHMEQRGQNAPAASGARKRHGPGPREARGARPGPRVPKTLVLVVAAVLLLVSAESALITQQDLAPQQRAAPQQKRSSPSEGLCPPGHHISEDGRDCISCKYGQDYSTHWNDLLFCLRCTRCDSGEVELSPCTTTRNTVCQCEEGTFREEDSPEMCRKCRTGCPRGMVKVGDCTPWSDIECVHKESGTKHSGEVPAVEETVTSSPGTPASPCSLSGIIIGVTVAAVVLIVAVFVKRGRKKLLYIFKQPFMRPVQTTQEEDGCSCRFPEEEEGGCEL

SEQ ID NO: 2986 - protein, 725 aa, Artificial Sequence
  Synthetic Polypeptide
MALPVTALLLPLALLLHAARPDIQMTQTTSSLSASLGDRVTISCRASQDISKYLNWYQQKPDGTVKLLIYHTSRLHSGVPSRFSGSGSGTDYSLTISNLEQEDIATYFCQQGNTLPYTFGGGTKLEITGGGGSGGGGSGGGGSEVKLQESGPGLVAPSQSLSVTCTVSGVSLPDYGVSWIRQPPRKGLEWLGVIWGSETTYYNSALKSRLTIIKDNSKSQVFLKMNSLQTDDTAIYYCAKHYYYGGSYAMDYWGQGTSVTVSSRVQSIKGNHLVKVYDYQEDGSVLLTCDAEAKNITWFKDGKMIGFLTEDKKKWNLGSNAKDPRGMYQCKGSQNKSKPLQVYYRMCQNCIELNAATISGFLFAEIVSIFVLAVGVYFIAGQDGVRQSRASDKQTLLPNDQLYQPLKDREDDQYSHLQGNQLRRNSRGSGATNFSLLKQAGDVEENPGPGIHMEQRGQNAPAASGARKRHGPGPREARGARPGPRVPKTLVLVVAAVLLLVSAESALITQQDLAPQQRAAPQQKRSSPSEGLCPPGHHISEDGRDCISCKYGQDYSTHWNDLLFCLRCTRCDSGEVELSPCTTTRNTVCQCEEGTFREEDSPEMCRKCRTGCPRGMVKVGDCTPWSDIECVHKESGTKHSGEVPAVEETVTSSPGTPASPCSLSGIIIGVTVAAVVLIVAVFVKRGRKKLLYIFKQPFMRPVQTTQEEDGCSCRFPEEEEGGCEL

SEQ ID NO: 2987 - protein, 708 aa, Artificial Sequence
  Synthetic Polypeptide
MALPVTALLLPLALLLHAARPDIQMTQTTSSLSASLGDRVTISCRASQDISKYLNWYQQKPDGTVKLLIYHTSRLHSGVPSRFSGSGSGTDYSLTISNLEQEDIATYFCQQGNTLPYTFGGGTKLEITGGGGSGGGGSGGGGSEVKLQESGPGLVAPSQSLSVTCTVSGVSLPDYGVSWIRQPPRKGLEWLGVIWGSETTYYNSALKSRLTIIKDNSKSQVFLKMNSLQTDDTAIYYCAKHYYYGGSYAMDYWGQGTSVTVSSRVQSFGLLDPKLCYLLDGILFIYGVILTALFLRVKFSRSADAPAYQQGQNQLYNELNLGRREEYDVLDKRRGRDPEMGGKPQRRKNPQEGLYNELQKDKMAEAYSEIGMKGERRRGKGHDGLYQGLSTATKDTYDALHMQALPPRSRGSGATNFSLLKQAGDVEENPGPGIHMEQRGQNAPAASGARKRHGPGPREARGARPGPRVPKTLVLVVAAVLLLVSAESALITQQDLAPQQRAAPQQKRSSPSEGLCPPGHHISEDGRDCISCKYGQDYSTHWNDLLFCLRCTRCDSGEVELSPCTTTRNTVCQCEEGTFREEDSPEMCRKCRTGCPRGMVKVGDCTPWSDIECVHKESGTKHSGEVPAVEETVTSSPGTPASPCSLSGIIIGVTVAAVVLIVAVFVKRGRKKLLYIFKQPFMRPVQTTQEEDGCSCRFPEEEEGGCEL

SEQ ID NO: 2988 - protein, 930 aa, Artificial Sequence
  Synthetic Polypeptide
MALPVTALLLPLALLLHAARPDIQMTQTTSSLSASLGDRVTISCRASQDISKYLNWYQQKPDGTVKLLIYHTSRLHSGVPSRFSGSGSGTDYSLTISNLEQEDIATYFCQQGNTLPYTFGGGTKLEITLEGQPKANPTVTLFPPSSEELQANKATLVCLISDFYPGAVTVAWKADGSPVKAGVETTKPSKQSNNKYAASSYLSLTPEQWKSHRSYSCQVTHEGSTVEKTVAPTECSGRADCGITSASYHQGVLSATILYEILLGKATLYAVLVSALVLMAMVKRKDSRGRAKRSGSGATNFSLLKQAGDVEENPGPTSMDWIWRILFLVGAATGAHSFEVKLQESGPGLVAPSQSLSVTCTVSGVSLPDYGVSWIRQPPRKGLEWLGVIWGSETTYYNSALKSRLTIIKDNSKSQVFLKMNSLQTDDTAIYYCAKHYYYGGSYAMDYWGQGTSVTVSSTRASTKGPSVFPLAPSSKSTSGGTAALGCLVKDYFPEPVTVSWNSGALTSGVHTFPAVLQSSGLYSLSSVVTVPSSSLGTQTYICNVNHKPSNTKVDKRVEPKSCIPEDTFFPSSDVPCDVKLVEKSFETDTNLNFQNLSVIGFRILLLKVAGFNLLMTLRLWSSRAKRSGSGVKQTLNFDLLKLAGDVESNPGPSRGHMEQRGQNAPAASGARKRHGPGPREARGARPGPRVPKTLVLVVAAVLLLVSAESALITQQDLAPQQRAAPQQKRSSPSEGLCPPGHHISEDGRDCISCKYGQDYSTHWNDLLFCLRCTRCDSGEVELSPCTTTRNTVCQCEEGTFREEDSPEMCRKCRTGCPRGMVKVGDCTPWSDIECVHKESGTKHSGEVPAVEETVTSSPGTPASPCSLSGIIIGVTVAAVVLIVAVFVKRGRKKLLYIFKQPFMRPVQTTQEEDGCSCRFPEEEEGGCEL

SEQ ID NO: 2989 - protein, 952 aa, Artificial Sequence
  Synthetic Polypeptide
MALPVTALLLPLALLLHAARPDIQMTQTTSSLSASLGDRVTISCRASQDISKYLNWYQQKPDGTVKLLIYHTSRLHSGVPSRFSGSGSGTDYSLTISNLEQEDIATYFCQQGNTLPYTFGGGTKLEITLEGQPKANPTVTLFPPSSEELQANKATLVCLISDFYPGAVTVAWKADGSPVKAGVETTKPSKQSNNKYAASSYLSLTPEQWKSHRSYSCQVTHEGSTVEKTVAPTECSPIKTDVITMDPKDNCSKDANDTLLLQLTNTSAYYMYLLLLLKSVVYFAIITCCLLRRTAFCCNGEKSRAKRSGSGATNFSLLKQAGDVEENPGPTSMDWIWRILFLVGAATGAHSFEVKLQESGPGLVAPSQSLSVTCTVSGVSLPDYGVSWIRQPPRKGLEWLGVIWGSETTYYNSALKSRLTIIKDNSKSQVFLKMNSLQTDDTAIYYCAKHYYYGGSYAMDYWGQGTSVTVSSTRASTKGPSVFPLAPSSKSTSGGTAALGCLVKDYFPEPVTVSWNSGALTSGVHTFPAVLQSSGLYSLSSVVTVPSSSLGTQTYICNVNHKPSNTKVDKRVEPKSCEVKTDSTDHVKPKETENTKQPSKSCHKPKAIVHTEKVNMMSLTVLGLRMLFAKTVAVNFLLTAKLFFLRAKRSGSGVKQTLNFDLLKLAGDVESNPGPSRGHMEQRGQNAPAASGARKRHGPGPREARGARPGPRVPKTLVLVVAAVLLLVSAESALITQQDLAPQQRAAPQQKRSSPSEGLCPPGHHISEDGRDCISCKYGQDYSTHWNDLLFCLRCTRCDSGEVELSPCTTTRNTVCQCEEGTFREEDSPEMCRKCRTGCPRGMVKVGDCTPWSDIECVHKESGTKHSGEVPAVEETVTSSPGTPASPCSLSGIIIGVTVAAVVLIVAVFVKRGRKKLLYIFKQPFMRPVQTTQEEDGCSCRFPEEEEGGCEL

SEQ ID NO: 2990 - protein, 919 aa, Artificial Sequence
  Synthetic Polypeptide
MALPVTALLLPLALLLHAARPNAGVTQTPKFQVLKTGQSMTLQCAQDMNHEYMSWYRQDPGMGLRLIHYSVAIQTTDQGEVPNGYNVSRSTIEDFPLRLLSAAPSQTSVYFCASSYLGNTGELFFGEGSRLTVEDLKNVFPPEVAVFEPSKAEIAHTQKATLVCLATGFYPDHVELSWWVNGKEVHSGVCTDPQPLKEQPALNDSRYCLSSRLRVSATFWQNPRNHFRCQVQFYGLSENDEWTQDRAKPVTQIVSAEAWGRADCGITSASYHQGVLSATILYEILLGKATLYAVLVSALVLMAMVKRKDSRGRAKRSGSGATNFSLLKQAGDVEENPGPTSMDWIWRILFLVGAATGAHSNAGVTQTPKFQVLKTGQSMTLQCAQDMNHEYMSWYRQDPGMGLRLIHYSVAIQTTDQGEVPNGYNVSRSTIEDFPLRLLSAAPSQTSVYFCASSYLGNTGELFFGEGSRLTVIQNPDPAVYQLRDSKSSDKSVCLFTDFDSQTNVSQSKDSDVYITDKCVLDMRSMDFKSNSAVAWSNKSDFACANAFNNSIIPEDTFFPSSDVPCDVKLVEKSFETDTNLNFQNLSVIGFRILLLKVAGFNLLMTLRLWSSRAKRSGSGVKQTLNFDLLKLAGDVESNPGPSRGHMEQRGQNAPAASGARKRHGPGPREARGARPGPRVPKTLVLVVAAVLLLVSAESALITQQDLAPQQRAAPQQKRSSPSEGLCPPGHHISEDGRDCISCKYGQDYSTHWNDLLFCLRCTRCDSGEVELSPCTTTRNTVCQCEEGTFREEDSPEMCRKCRTGCPRGMVKVGDCTPWSDIECVHKESGTKHSGEVPAVEETVTSSPGTPASPCSLSGIIIGVTVAAVVLIVAVFVKRGRKKLLYIFKQPFMRPVQTTQEEDGCSCRFPEEEEGGCEL

SEQ ID NO: 2991 - protein, 922 aa, Artificial Sequence
  Synthetic Polypeptide
MLLLLVPVLEVIFTLGGTRAQSVTQLGSHVSVSEGALVLLRCNYSSSVPPYLFWYVQYPNQGLQLLLKHTTGATLVKGINGFEAEFKKSETSFHLTKPSAHMSDAAEYFCAVSDSRAAGNKLTFGGGTRVLVKPNIQNPDPAVYQLRDSKSSDKSVCLFTDFDSQTNVSQSKDSDVYITDKTVLDMRSMDFKSNSAVAWSNKSDFACANAFNNSIIPEDTFFPSPESSCDVKLVEKSFETDTNLNFQNLSVIGFRILLLKVAGFNLLMTLRLWSSRAKRSGSGATNFSLLKQAGDVEENPGPTSMGIRLLCRVAFCFLAVGLVDVKVTQSSRYLVKRTGEKVFLECVQDMDHENMFWYRQDPGLGLRLIYFSYDVKMKEKGDIPEGYSVSREKKERFSLILESASTNQTSMYLCASRFPGTAYNSPLHFGNGTRLTVTEDLNKVFPPEVAVFEPSEAEISHTQKATLVCLATGFFPDHVELSWWVNGKEVHSGVSTDPQPLKEQPALNDSRYCLSSRLRVSATFWQNPRNHFRCQVQFYGLSENDEWTQDRAKPVTQIVSAEAWGRADCGFTSVSYQQGVLSATILYEILLGKATLYAVLVSALVLMAMVKRKDFRAKRSGSGVKQTLNFDLLKLAGDVESNPGPSRGHMEQRGQNAPAASGARKRHGPGPREARGARPGPRVPKTLVLVVAAVLLLVSAESALITQQDLAPQQRAAPQQKRSSPSEGLCPPGHHISEDGRDCISCKYGQDYSTHWNDLLFCLRCTRCDSGEVELSPCTTTRNTVCQCEEGTFREEDSPEMCRKCRTGCPRGMVKVGDCTPWSDIECVHKESGTKHSGEVPAVEETVTSSPGTPASPCSLSGIIIGVTVAAVVLIVAVFVKRGRKKLLYIFKQPFMRPVQTTQEEDGCSCRFPEEEEGGCEL

SEQ ID NO: 2992 - protein, 6 aa, Artificial Sequence
  Synthetic Polypeptide
GGGGGG

SEQ ID NO: 2993 - protein, 793 aa, Artificial Sequence
  Synthetic Polypeptide
MALPVTALLLPLALLLHAARPDIQMTQTTSSLSASLGDRVTISCRASQDISKYLNWYQQKPDGTVKLLIYHTSRLHSGVPSRFSGSGSGTDYSLTISNLEQEDIATYFCQQGNTLPYTFGGGTKLEITGGGGSGGGGSGGGGSEVKLQESGPGLVAPSQSLSVTCTVSGVSLPDYGVSWIRQPPRKGLEWLGVIWGSETTYYNSALKSRLTIIKDNSKSQVFLKMNSLQTDDTAIYYCAKHYYYGGSYAMDYWGQGTSVTVSSRVEQKLISEEDLAKPTTTPAPRPPTPAPTIASQPLSLRPEACRPAAGGAVHTRGLDFACDIYIWAPLAGTCGVLLLSLVITLYCKRGRKKLLYIFKQPFMRPVQTTQEEDGCSCRFPEEEEGGCELRVKFSRSADAPAYQQGQNQLYNELNLGRREEYDVLDKRRGRDPEMGGKPRRKNPQEGLYNELQKDKMAEAYSEIGMKGERRRGKGHDGLYQGLSTATKDTYDALHMQALPPRSSGSGEGRGSLLTCGDVEENPGPHMEQRGQNAPAASGARKRHGPGPREARGARPGPRVPKTLVLVVAAVLLLVSAESALITQQDLAPQQRAAPQQKRSSPSEGLCPPGHHISEDGRDCISCKYGQDYSTHWNDLLFCLRCTRCDSGEVELSPCTTTRNTVCQCEEGTFREEDSPEMCRKCRTGCPRGMVKVGDCTPWSDIECVHKESGTKHSGEVPAVEETVTSSPGTPASPCSLSGIIIGVTVAAVVLIVAVFVRRDQRLPPDAHKPPGGGSFRTPIQEEQADAHSTLAKI

SEQ ID NO: 2994 - protein, 951 aa, Artificial Sequence
  Synthetic Polypeptide
MALPVTALLLPLALLLHAARPDIQMTQTTSSLSASLGDRVTISCRASQDISKYLNWYQQKPDGTVKLLIYHTSRLHSGVPSRFSGSGSGTDYSLTISNLEQEDIATYFCQQGNTLPYTFGGGTKLEITLEGKPIPNPLLGLDSTGSGEDLKNVFPPEVAVFEPSKAEIAHTQKATLVCLATGFYPDHVELSWWVNGKEVHSGVCTDPQPLKEQPALNDSRYCLSSRLRVSATFWQNPRNHFRCQVQFYGLSENDEWTQDRAKPVTQIVSAEAWGRADCGITSASYHQGVLSATILYEILLGKATLYAVLVSALVLMAMVKRKDSRGRAKRSGSGATNFSLLKQAGDVEENPGPTSMDWIWRILFLVGAATGAHSFEVKLQESGPGLVAPSQSLSVTCTVSGVSLPDYGVSWIRQPPRKGLEWLGVIWGSETTYYNSALKSRLTIIKDNSKSQVFLKMNSLQTDDTAIYYCAKHYYYGGSYAMDYWGQGTSVTVSSTREQKLISEEDGSGIQNPDPAVYQLRDSKSSDKSVCLFTDFDSQTNVSQSKDSDVYITDKCVLDMRSMDFKSNSAVAWSNKSDFACANAFNNSIIPEDTFFPSSDVPCDVKLVEKSFETDTNLNFQNLSVIGFRILLLKVAGFNLLMTLRLWSSRAKRSGSGVKQTLNFDLLKLAGDVESNPGPSRGHMEQRGQNAPAASGARKRHGPGPREARGARPGPRVPKTLVLVVAAVLLLVSAESALITQQDLAPQQRAAPQQKRSSPSEGLCPPGHHISEDGRDCISCKYGQDYSTHWNDLLFCLRCTRCDSGEVELSPCTTTRNTVCQCEEGTFREEDSPEMCRKCRTGCPRGMVKVGDCTPWSDIECVHKESGTKHSGEVPAVEETVTSSPGTPASPCSLSGIIIGVTVAAVVLIVAVFVRRDQRLPPDAHKPPGGGSFRTPIQEEQADAHSTLAKI

SEQ ID NO: 2995 - protein, 757 aa, Artificial Sequence
  Synthetic Polypeptide
MALPVTALLLPLALLLHAARPDIQMTQTTSSLSASLGDRVTISCRASQDISKYLNWYQQKPDGTVKLLIYHTSRLHSGVPSRFSGSGSGTDYSLTISNLEQEDIATYFCQQGNTLPYTFGGGTKLEITGGGGSGGGGSGGGGSEVKLQESGPGLVAPSQSLSVTCTVSGVSLPDYGVSWIRQPPRKGLEWLGVIWGSETTYYNSALKSRLTIIKDNSKSQVFLKMNSLQTDDTAIYYCAKHYYYGGSYAMDYWGQGTSVTVSSRVEQKLISEEDLAKPTTTPAPRPPTPAPTIASQPLSLRPEACRPAAGGAVHTRGLDFACDIYIWAPLAGTCGVLLLSLVITLYCGRARVKFSRSADAPAYQQGQNQLYNELNLGRREEYDVLDKRRGRDPEMGGKPRRKNPQEGLYNELQKDKMAEAYSEIGMKGERRRGKGHDGLYQGLSTATKDTYDALHMQALPPRSRGSGATNFSLLKQAGDVEENPGPGIHMEQRGQNAPAASGARKRHGPGPREARGARPGPRVPKTLVLVVAAVLLLVSAESALITQQDLAPQQRAAPQQKRSSPSEGLCPPGHHISEDGRDCISCKYGQDYSTHWNDLLFCLRCTRCDSGEVELSPCTTTRNTVCQCEEGTFREEDSPEMCRKCRTGCPRGMVKVGDCTPWSDIECVHKESGTKHSGEVPAVEETVTSSPGTPASPCSLSGIIIGVTVAAVVLIVAVFVRRDQRLPPDAHKPPGGGSFRTPIQEEQADAHSTLAKI

SEQ ID NO: 2996 - protein, 745 aa, Artificial Sequence
  Synthetic Polypeptide
MALPVTALLLPLALLLHAARPDIQMTQTTSSLSASLGDRVTISCRASQDISKYLNWYQQKPDGTVKLLIYHTSRLHSGVPSRFSGSGSGTDYSLTISNLEQEDIATYFCQQGNTLPYTFGGGTKLEITGGGGSGGGGSGGGGSEVKLQESGPGLVAPSQSLSVTCTVSGVSLPDYGVSWIRQPPRKGLEWLGVIWGSETTYYNSALKSRLTIIKDNSKSQVFLKMNSLQTDDTAIYYCAKHYYYGGSYAMDYWGQGTSVTVSSRVDGNEEMGGITQTPYKVSISGTTVILTCPQYPGSEILWQHNDKNIGGDEDDKNIGSDEDHLSLKEFSELEQSGYYVCYPRGSKPEDANFYLYLRARVCENCMEMDVMSVATIVIVDICITGGLLLLVYYWSKNRKAKAKPVTRGAGAGGRQRGQNKERPPPVPNPDYEPIRKGQRDLYSGLNQRRISRGSGATNFSLLKQAGDVEENPGPGIHMEQRGQNAPAASGARKRHGPGPREARGARPGPRVPKTLVLVVAAVLLLVSAESALITQQDLAPQQRAAPQQKRSSPSEGLCPPGHHISEDGRDCISCKYGQDYSTHWNDLLFCLRCTRCDSGEVELSPCTTTRNTVCQCEEGTFREEDSPEMCRKCRTGCPRGMVKVGDCTPWSDIECVHKESGTKHSGEVPAVEETVTSSPGTPASPCSLSGIIIGVTVAAVVLIVAVFVRRDQRLPPDAHKPPGGGSFRTPIQEEQADAHSTLAKI

SEQ ID NO: 2997 - protein, 710 aa, Artificial Sequence
  Synthetic Polypeptide
MALPVTALLLPLALLLHAARPDIQMTQTTSSLSASLGDRVTISCRASQDISKYLNWYQQKPDGTVKLLIYHTSRLHSGVPSRFSGSGSGTDYSLTISNLEQEDIATYFCQQGNTLPYTFGGGTKLEITGGGGSGGGGSGGGGSEVKLQESGPGLVAPSQSLSVTCTVSGVSLPDYGVSWIRQPPRKGLEWLGVIWGSETTYYNSALKSRLTIIKDNSKSQVFLKMNSLQTDDTAIYYCAKHYYYGGSYAMDYWGQGTSVTVSSRVFKIPIEELEDRVFVNCNTSITWVEGTVGTLLSDITRLDLGKRILDPRGIYRCNGTDIYKDKESTVQVHYRMCQSCVELDPATVAGIIVTDVIATLLLALGVFCFAGHETGRLSGAADTQALLRNDQVYQPLRDRDDAQYSHLGGNWARNKSRGSGATNFSLLKQAGDVEENPGPGIHMEQRGQNAPAASGARKRHGPGPREARGARPGPRVPKTLVLVVAAVLLLVSAESALITQQDLAPQQRAAPQQKRSSPSEGLCPPGHHISEDGRDCISCKYGQDYSTHWNDLLFCLRCTRCDSGEVELSPCTTTRNTVCQCEEGTFREEDSPEMCRKCRTGCPRGMVKVGDCTPWSDIECVHKESGTKHSGEVPAVEETVTSSPGTPASPCSLSGIIIGVTVAAVVLIVAVFVRRDQRLPPDAHKPPGGGSFRTPIQEEQADAHSTLAKI

SEQ ID NO: 2998 - protein, 720 aa, Artificial Sequence
  Synthetic Polypeptide
MALPVTALLLPLALLLHAARPDIQMTQTTSSLSASLGDRVTISCRASQDISKYLNWYQQKPDGTVKLLIYHTSRLHSGVPSRFSGSGSGTDYSLTISNLEQEDIATYFCQQGNTLPYTFGGGTKLEITGGGGSGGGGSGGGGSEVKLQESGPGLVAPSQSLSVTCTVSGVSLPDYGVSWIRQPPRKGLEWLGVIWGSETTYYNSALKSRLTIIKDNSKSQVFLKMNSLQTDDTAIYYCAKHYYYGGSYAMDYWGQGTSVTVSSRVQSIKGNHLVKVYDYQEDGSVLLTCDAEAKNITWFKDGKMIGFLTEDKKKWNLGSNAKDPRGMYQCKGSQNKSKPLQVYYRMCQNCIELNAATISGFLFAEIVSIFVLAVGVYFIAGQDGVRQSRASDKQTLLPNDQLYQPLKDREDDQYSHLQGNQLRRNSRGSGATNFSLLKQAGDVEENPGPGIHMEQRGQNAPAASGARKRHGPGPREARGARPGPRVPKTLVLVVAAVLLLVSAESALITQQDLAPQQRAAPQQKRSSPSEGLCPPGHHISEDGRDCISCKYGQDYSTHWNDLLFCLRCTRCDSGEVELSPCTTTRNTVCQCEEGTFREEDSPEMCRKCRTGCPRGMVKVGDCTPWSDIECVHKESGTKHSGEVPAVEETVTSSPGTPASPCSLSGIIIGVTVAAVVLIVAVFVRRDQRLPPDAHKPPGGGSFRTPIQEEQADAHSTLAKI

SEQ ID NO: 2999 - protein, 703 aa, Artificial Sequence
  Synthetic Polypeptide
MALPVTALLLPLALLLHAARPDIQMTQTTSSLSASLGDRVTISCRASQDISKYLNWYQQKPDGTVKLLIYHTSRLHSGVPSRFSGSGSGTDYSLTISNLEQEDIATYFCQQGNTLPYTFGGGTKLEITGGGGSGGGGSGGGGSEVKLQESGPGLVAPSQSLSVTCTVSGVSLPDYGVSWIRQPPRKGLEWLGVIWGSETTYYNSALKSRLTIIKDNSKSQVFLKMNSLQTDDTAIYYCAKHYYYGGSYAMDYWGQGTSVTVSSRVQSFGLLDPKLCYLLDGILFIYGVILTALFLRVKFSRSADAPAYQQGQNQLYNELNLGRREEYDVLDKRRGRDPEMGGKPQRRKNPQEGLYNELQKDKMAEAYSEIGMKGERRRGKGHDGLYQGLSTATKDTYDALHMQALPPRSRGSGATNFSLLKQAGDVEENPGPGIHMEQRGQNAPAASGARKRHGPGPREARGARPGPRVPKTLVLVVAAVLLLVSAESALITQQDLAPQQRAAPQQKRSSPSEGLCPPGHHISEDGRDCISCKYGQDYSTHWNDLLFCLRCTRCDSGEVELSPCTTTRNTVCQCEEGTFREEDSPEMCRKCRTGCPRGMVKVGDCTPWSDIECVHKESGTKHSGEVPAVEETVTSSPGTPASPCSLSGIIIGVTVAAVVLIVAVFVRRDQRLPPDAHKPPGGGSFRTPIQEEQADAHSTLAKI

SEQ ID NO: 3000 - protein, 925 aa, Artificial Sequence
  Synthetic Polypeptide
MALPVTALLLPLALLLHAARPDIQMTQTTSSLSASLGDRVTISCRASQDISKYLNWYQQKPDGTVKLLIYHTSRLHSGVPSRFSGSGSGTDYSLTISNLEQEDIATYFCQQGNTLPYTFGGGTKLEITLEGQPKANPTVTLFPPSSEELQANKATLVCLISDFYPGAVTVAWKADGSPVKAGVETTKPSKQSNNKYAASSYLSLTPEQWKSHRSYSCQVTHEGSTVEKTVAPTECSGRADCGITSASYHQGVLSATILYEILLGKATLYAVLVSALVLMAMVKRKDSRGRAKRSGSGATNFSLLKQAGDVEENPGPTSMDWIWRILFLVGAATGAHSFEVKLQESGPGLVAPSQSLSVTCTVSGVSLPDYGVSWIRQPPRKGLEWLGVIWGSETTYYNSALKSRLTIIKDNSKSQVFLKMNSLQTDDTAIYYCAKHYYYGGSYAMDYWGQGTSVTVSSTRASTKGPSVFPLAPSSKSTSGGTAALGCLVKDYFPEPVTVSWNSGALTSGVHTFPAVLQSSGLYSLSSVVTVPSSSLGTQTYICNVNHKPSNTKVDKRVEPKSCIPEDTFFPSSDVPCDVKLVEKSFETDTNLNFQNLSVIGFRILLLKVAGFNLLMTLRLWSSRAKRSGSGVKQTLNFDLLKLAGDVESNPGPSRGHMEQRGQNAPAASGARKRHGPGPREARGARPGPRVPKTLVLVVAAVLLLVSAESALITQQDLAPQQRAAPQQKRSSPSEGLCPPGHHISEDGRDCISCKYGQDYSTHWNDLLFCLRCTRCDSGEVELSPCTTTRNTVCQCEEGTFREEDSPEMCRKCRTGCPRGMVKVGDCTPWSDIECVHKESGTKHSGEVPAVEETVTSSPGTPASPCSLSGIIIGVTVAAVVLIVAVFVRRDQRLPPDAHKPPGGGSFRTPIQEEQADAHSTLAKI

SEQ ID NO: 3001 - protein, 947 aa, Artificial Sequence
  Synthetic Polypeptide
MALPVTALLLPLALLLHAARPDIQMTQTTSSLSASLGDRVTISCRASQDISKYLNWYQQKPDGTVKLLIYHTSRLHSGVPSRFSGSGSGTDYSLTISNLEQEDIATYFCQQGNTLPYTFGGGTKLEITLEGQPKANPTVTLFPPSSEELQANKATLVCLISDFYPGAVTVAWKADGSPVKAGVETTKPSKQSNNKYAASSYLSLTPEQWKSHRSYSCQVTHEGSTVEKTVAPTECSPIKTDVITMDPKDNCSKDANDTLLLQLTNTSAYYMYLLLLLKSVVYFAIITCCLLRRTAFCCNGEKSRAKRSGSGATNFSLLKQAGDVEENPGPTSMDWIWRILFLVGAATGAHSFEVKLQESGPGLVAPSQSLSVTCTVSGVSLPDYGVSWIRQPPRKGLEWLGVIWGSETTYYNSALKSRLTIIKDNSKSQVFLKMNSLQTDDTAIYYCAKHYYYGGSYAMDYWGQGTSVTVSSTRASTKGPSVFPLAPSSKSTSGGTAALGCLVKDYFPEPVTVSWNSGALTSGVHTFPAVLQSSGLYSLSSVVTVPSSSLGTQTYICNVNHKPSNTKVDKRVEPKSCEVKTDSTDHVKPKETENTKQPSKSCHKPKAIVHTEKVNMMSLTVLGLRMLFAKTVAVNFLLTAKLFFLRAKRSGSGVKQTLNFDLLKLAGDVESNPGPSRGHMEQRGQNAPAASGARKRHGPGPREARGARPGPRVPKTLVLVVAAVLLLVSAESALITQQDLAPQQRAAPQQKRSSPSEGLCPPGHHISEDGRDCISCKYGQDYSTHWNDLLFCLRCTRCDSGEVELSPCTTTRNTVCQCEEGTFREEDSPEMCRKCRTGCPRGMVKVGDCTPWSDIECVHKESGTKHSGEVPAVEETVTSSPGTPASPCSLSGIIIGVTVAAVVLIVAVFVRRDQRLPPDAHKPPGGGSFRTPIQEEQADAHSTLAKI

SEQ ID NO: 3002 - protein, 914 aa, Artificial Sequence
  Synthetic Polypeptide
MALPVTALLLPLALLLHAARPNAGVTQTPKFQVLKTGQSMTLQCAQDMNHEYMSWYRQDPGMGLRLIHYSVAIQTTDQGEVPNGYNVSRSTIEDFPLRLLSAAPSQTSVYFCASSYLGNTGELFFGEGSRLTVEDLKNVFPPEVAVFEPSKAEIAHTQKATLVCLATGFYPDHVELSWWVNGKEVHSGVCTDPQPLKEQPALNDSRYCLSSRLRVSATFWQNPRNHFRCQVQFYGLSENDEWTQDRAKPVTQIVSAEAWGRADCGITSASYHQGVLSATILYEILLGKATLYAVLVSALVLMAMVKRKDSRGRAKRSGSGATNFSLLKQAGDVEENPGPTSMDWIWRILFLVGAATGAHSNAGVTQTPKFQVLKTGQSMTLQCAQDMNHEYMSWYRQDPGMGLRLIHYSVAIQTTDQGEVPNGYNVSRSTIEDFPLRLLSAAPSQTSVYFCASSYLGNTGELFFGEGSRLTVIQNPDPAVYQLRDSKSSDKSVCLFTDFDSQTNVSQSKDSDVYITDKCVLDMRSMDFKSNSAVAWSNKSDFACANAFNNSIIPEDTFFPSSDVPCDVKLVEKSFETDTNLNFQNLSVIGFRILLLKVAGFNLLMTLRLWSSRAKRSGSGVKQTLNFDLLKLAGDVESNPGPSRGHMEQRGQNAPAASGARKRHGPGPREARGARPGPRVPKTLVLVVAAVLLLVSAESALITQQDLAPQQRAAPQQKRSSPSEGLCPPGHHISEDGRDCISCKYGQDYSTHWNDLLFCLRCTRCDSGEVELSPCTTTRNTVCQCEEGTFREEDSPEMCRKCRTGCPRGMVKVGDCTPWSDIECVHKESGTKHSGEVPAVEETVTSSPGTPASPCSLSGIIIGVTVAAVVLIVAVFVRRDQRLPPDAHKPPGGGSFRTPIQEEQADAHSTLAKI

SEQ ID NO: 3003 - protein, 917 aa, Artificial Sequence
  Synthetic Polypeptide
MLLLLVPVLEVIFTLGGTRAQSVTQLGSHVSVSEGALVLLRCNYSSSVPPYLFWYVQYPNQGLQLLLKHTTGATLVKGINGFEAEFKKSETSFHLTKPSAHMSDAAEYFCAVSDSRAAGNKLTFGGGTRVLVKPNIQNPDPAVYQLRDSKSSDKSVCLFTDFDSQTNVSQSKDSDVYITDKTVLDMRSMDFKSNSAVAWSNKSDFACANAFNNSIIPEDTFFPSPESSCDVKLVEKSFETDTNLNFQNLSVIGFRILLLKVAGFNLLMTLRLWSSRAKRSGSGATNFSLLKQAGDVEENPGPTSMGIRLLCRVAFCFLAVGLVDVKVTQSSRYLVKRTGEKVFLECVQDMDHENMFWYRQDPGLGLRLIYFSYDVKMKEKGDIPEGYSVSREKKERFSLILESASTNQTSMYLCASRFPGTAYNSPLHFGNGTRLTVTEDLNKVFPPEVAVFEPSEAEISHTQKATLVCLATGFFPDHVELSWWVNGKEVHSGVSTDPQPLKEQPALNDSRYCLSSRLRVSATFWQNPRNHFRCQVQFYGLSENDEWTQDRAKPVTQIVSAEAWGRADCGFTSVSYQQGVLSATILYEILLGKATLYAVLVSALVLMAMVKRKDFRAKRSGSGVKQTLNFDLLKLAGDVESNPGPSRGHMEQRGQNAPAASGARKRHGPGPREARGARPGPRVPKTLVLVVAAVLLLVSAESALITQQDLAPQQRAAPQQKRSSPSEGLCPPGHHISEDGRDCISCKYGQDYSTHWNDLLFCLRCTRCDSGEVELSPCTTTRNTVCQCEEGTFREEDSPEMCRKCRTGCPRGMVKVGDCTPWSDIECVHKESGTKHSGEVPAVEETVTSSPGTPASPCSLSGIIIGVTVAAVVLIVAVFVRRDQRLPPDAHKPPGGGSFRTPIQEEQADAHSTLAKI

SEQ ID NO: 3004 - protein, 6 aa, Artificial Sequence
  Synthetic Polypeptide
GGGGGG

SEQ ID NO: 3005 - protein, 814 aa, Artificial Sequence
  Synthetic Polypeptide
MALPVTALLLPLALLLHAARPDIQMTQTTSSLSASLGDRVTISCRASQDISKYLNWYQQKPDGTVKLLIYHTSRLHSGVPSRFSGSGSGTDYSLTISNLEQEDIATYFCQQGNTLPYTFGGGTKLEITGGGGSGGGGSGGGGSEVKLQESGPGLVAPSQSLSVTCTVSGVSLPDYGVSWIRQPPRKGLEWLGVIWGSETTYYNSALKSRLTIIKDNSKSQVFLKMNSLQTDDTAIYYCAKHYYYGGSYAMDYWGQGTSVTVSSRVEQKLISEEDLAKPTTTPAPRPPTPAPTIASQPLSLRPEACRPAAGGAVHTRGLDFACDIYIWAPLAGTCGVLLLSLVITLYCKRGRKKLLYIFKQPFMRPVQTTQEEDGCSCRFPEEEEGGCELRVKFSRSADAPAYQQGQNQLYNELNLGRREEYDVLDKRRGRDPEMGGKPRRKNPQEGLYNELQKDKMAEAYSEIGMKGERRRGKGHDGLYQGLSTATKDTYDALHMQALPPRSSGSGEGRGSLLTCGDVEENPGPHMEQRGQNAPAASGARKRHGPGPREARGARPGPRVPKTLVLVVAAVLLLVSAESALITQQDLAPQQRAAPQQKRSSPSEGLCPPGHHISEDGRDCISCKYGQDYSTHWNDLLFCLRCTRCDSGEVELSPCTTTRNTVCQCEEGTFREEDSPEMCRKCRTGCPRGMVKVGDCTPWSDIECVHKESGTKHSGEVPAVEETVTSSPGTPASPCSLSGIIIGVTVAAVVLIVAVFVQLGLHIWQLRSQCMWPRETQLLLEVPPSTEDARSCQFPEEERGERSAEEKGRLGDLWV

SEQ ID NO: 3006 - protein, 972 aa, Artificial Sequence
  Synthetic Polypeptide
MALPVTALLLPLALLLHAARPDIQMTQTTSSLSASLGDRVTISCRASQDISKYLNWYQQKPDGTVKLLIYHTSRLHSGVPSRFSGSGSGTDYSLTISNLEQEDIATYFCQQGNTLPYTFGGGTKLEITLEGKPIPNPLLGLDSTGSGEDLKNVFPPEVAVFEPSKAEIAHTQKATLVCLATGFYPDHVELSWWVNGKEVHSGVCTDPQPLKEQPALNDSRYCLSSRLRVSATFWQNPRNHFRCQVQFYGLSENDEWTQDRAKPVTQIVSAEAWGRADCGITSASYHQGVLSATILYEILLGKATLYAVLVSALVLMAMVKRKDSRGRAKRSGSGATNFSLLKQAGDVEENPGPTSMDWIWRILFLVGAATGAHSFEVKLQESGPGLVAPSQSLSVTCTVSGVSLPDYGVSWIRQPPRKGLEWLGVIWGSETTYYNSALKSRLTIIKDNSKSQVFLKMNSLQTDDTAIYYCAKHYYYGGSYAMDYWGQGTSVTVSSTREQKLISEEDGSGIQNPDPAVYQLRDSKSSDKSVCLFTDFDSQTNVSQSKDSDVYITDKCVLDMRSMDFKSNSAVAWSNKSDFACANAFNNSIIPEDTFFPSSDVPCDVKLVEKSFETDTNLNFQNLSVIGFRILLLKVAGFNLLMTLRLWSSRAKRSGSGVKQTLNFDLLKLAGDVESNPGPSRGHMEQRGQNAPAASGARKRHGPGPREARGARPGPRVPKTLVLVVAAVLLLVSAESALITQQDLAPQQRAAPQQKRSSPSEGLCPPGHHISEDGRDCISCKYGQDYSTHWNDLLFCLRCTRCDSGEVELSPCTTTRNTVCQCEEGTFREEDSPEMCRKCRTGCPRGMVKVGDCTPWSDIECVHKESGTKHSGEVPAVEETVTSSPGTPASPCSLSGIIIGVTVAAVVLIVAVFVQLGLHIWQLRSQCMWPRETQLLLEVPPSTEDARSCQFPEEERGERSAEEKGRLGDLWV

SEQ ID NO: 3007 - protein, 778 aa, Artificial Sequence
  Synthetic Polypeptide
MALPVTALLLPLALLLHAARPDIQMTQTTSSLSASLGDRVTISCRASQDISKYLNWYQQKPDGTVKLLIYHTSRLHSGVPSRFSGSGSGTDYSLTISNLEQEDIATYFCQQGNTLPYTFGGGTKLEITGGGGSGGGGSGGGGSEVKLQESGPGLVAPSQSLSVTCTVSGVSLPDYGVSWIRQPPRKGLEWLGVIWGSETTYYNSALKSRLTIIKDNSKSQVFLKMNSLQTDDTAIYYCAKHYYYGGSYAMDYWGQGTSVTVSSRVEQKLISEEDLAKPTTTPAPRPPTPAPTIASQPLSLRPEACRPAAGGAVHTRGLDFACDIYIWAPLAGTCGVLLLSLVITLYCGRARVKFSRSADAPAYQQGQNQLYNELNLGRREEYDVLDKRRGRDPEMGGKPRRKNPQEGLYNELQKDKMAEAYSEIGMKGERRRGKGHDGLYQGLSTATKDTYDALHMQALPPRSRGSGATNFSLLKQAGDVEENPGPGIHMEQRGQNAPAASGARKRHGPGPREARGARPGPRVPKTLVLVVAAVLLLVSAESALITQQDLAPQQRAAPQQKRSSPSEGLCPPGHHISEDGRDCISCKYGQDYSTHWNDLLFCLRCTRCDSGEVELSPCTTTRNTVCQCEEGTFREEDSPEMCRKCRTGCPRGMVKVGDCTPWSDIECVHKESGTKHSGEVPAVEETVTSSPGTPASPCSLSGIIIGVTVAAVVLIVAVFVQLGLHIWQLRSQCMWPRETQLLLEVPPSTEDARSCQFPEEERGERSAEEKGRLGDLWV

SEQ ID NO: 3008 - protein, 766 aa, Artificial Sequence
  Synthetic Polypeptide
MALPVTALLLPLALLLHAARPDIQMTQTTSSLSASLGDRVTISCRASQDISKYLNWYQQKPDGTVKLLIYHTSRLHSGVPSRFSGSGSGTDYSLTISNLEQEDIATYFCQQGNTLPYTFGGGTKLEITGGGGSGGGGSGGGGSEVKLQESGPGLVAPSQSLSVTCTVSGVSLPDYGVSWIRQPPRKGLEWLGVIWGSETTYYNSALKSRLTIIKDNSKSQVFLKMNSLQTDDTAIYYCAKHYYYGGSYAMDYWGQGTSVTVSSRVDGNEEMGGITQTPYKVSISGTTVILTCPQYPGSEILWQHNDKNIGGDEDDKNIGSDEDHLSLKEFSELEQSGYYVCYPRGSKPEDANFYLYLRARVCENCMEMDVMSVATIVIVDICITGGLLLLVYYWSKNRKAKAKPVTRGAGAGGRQRGQNKERPPPVPNPDYEPIRKGQRDLYSGLNQRRISRGSGATNFSLLKQAGDVEENPGPGIHMEQRGQNAPAASGARKRHGPGPREARGARPGPRVPKTLVLVVAAVLLLVSAESALITQQDLAPQQRAAPQQKRSSPSEGLCPPGHHISEDGRDCISCKYGQDYSTHWNDLLFCLRCTRCDSGEVELSPCTTTRNTVCQCEEGTFREEDSPEMCRKCRTGCPRGMVKVGDCTPWSDIECVHKESGTKHSGEVPAVEETVTSSPGTPASPCSLSGIIIGVTVAAVVLIVAVFVQLGLHIWQLRSQCMWPRETQLLLEVPPSTEDARSCQFPEEERGERSAEEKGRLGDLWV

SEQ ID NO: 3009 - protein, 731 aa, Artificial Sequence
  Synthetic Polypeptide
MALPVTALLLPLALLLHAARPDIQMTQTTSSLSASLGDRVTISCRASQDISKYLNWYQQKPDGTVKLLIYHTSRLHSGVPSRFSGSGSGTDYSLTISNLEQEDIATYFCQQGNTLPYTFGGGTKLEITGGGGSGGGGSGGGGSEVKLQESGPGLVAPSQSLSVTCTVSGVSLPDYGVSWIRQPPRKGLEWLGVIWGSETTYYNSALKSRLTIIKDNSKSQVFLKMNSLQTDDTAIYYCAKHYYYGGSYAMDYWGQGTSVTVSSRVFKIPIEELEDRVFVNCNTSITWVEGTVGTLLSDITRLDLGKRILDPRGIYRCNGTDIYKDKESTVQVHYRMCQSCVELDPATVAGIIVTDVIATLLLALGVFCFAGHETGRLSGAADTQALLRNDQVYQPLRDRDDAQYSHLGGNWARNKSRGSGATNFSLLKQAGDVEENPGPGIHMEQRGQNAPAASGARKRHGPGPREARGARPGPRVPKTLVLVVAAVLLLVSAESALITQQDLAPQQRAAPQQKRSSPSEGLCPPGHHISEDGRDCISCKYGQDYSTHWNDLLFCLRCTRCDSGEVELSPCTTTRNTVCQCEEGTFREEDSPEMCRKCRTGCPRGMVKVGDCTPWSDIECVHKESGTKHSGEVPAVEETVTSSPGTPASPCSLSGIIIGVTVAAVVLIVAVFVQLGLHIWQLRSQCMWPRETQLLLEVPPSTEDARSCQFPEEERGERSAEEKGRLGDLWV

SEQ ID NO: 3010 - protein, 741 aa, Artificial Sequence
  Synthetic Polypeptide
MALPVTALLLPLALLLHAARPDIQMTQTTSSLSASLGDRVTISCRASQDISKYLNWYQQKPDGTVKLLIYHTSRLHSGVPSRFSGSGSGTDYSLTISNLEQEDIATYFCQQGNTLPYTFGGGTKLEITGGGGSGGGGSGGGGSEVKLQESGPGLVAPSQSLSVTCTVSGVSLPDYGVSWIRQPPRKGLEWLGVIWGSETTYYNSALKSRLTIIKDNSKSQVFLKMNSLQTDDTAIYYCAKHYYYGGSYAMDYWGQGTSVTVSSRVQSIKGNHLVKVYDYQEDGSVLLTCDAEAKNITWFKDGKMIGFLTEDKKKWNLGSNAKDPRGMYQCKGSQNKSKPLQVYYRMCQNCIELNAATISGFLFAEIVSIFVLAVGVYFIAGQDGVRQSRASDKQTLLPNDQLYQPLKDREDDQYSHLQGNQLRRNSRGSGATNFSLLKQAGDVEENPGPGIHMEQRGQNAPAASGARKRHGPGPREARGARPGPRVPKTLVLVVAAVLLLVSAESALITQQDLAPQQRAAPQQKRSSPSEGLCPPGHHISEDGRDCISCKYGQDYSTHWNDLLFCLRCTRCDSGEVELSPCTTTRNTVCQCEEGTFREEDSPEMCRKCRTGCPRGMVKVGDCTPWSDIECVHKESGTKHSGEVPAVEETVTSSPGTPASPCSLSGIIIGVTVAAVVLIVAVFVQLGLHIWQLRSQCMWPRETQLLLEVPPSTEDARSCQFPEEERGERSAEEKGRLGDLWV

SEQ ID NO: 3011 - protein, 724 aa, Artificial Sequence
  Synthetic Polypeptide
MALPVTALLLPLALLLHAARPDIQMTQTTSSLSASLGDRVTISCRASQDISKYLNWYQQKPDGTVKLLIYHTSRLHSGVPSRFSGSGSGTDYSLTISNLEQEDIATYFCQQGNTLPYTFGGGTKLEITGGGGSGGGGSGGGGSEVKLQESGPGLVAPSQSLSVTCTVSGVSLPDYGVSWIRQPPRKGLEWLGVIWGSETTYYNSALKSRLTIIKDNSKSQVFLKMNSLQTDDTAIYYCAKHYYYGGSYAMDYWGQGTSVTVSSRVQSFGLLDPKLCYLLDGILFIYGVILTALFLRVKFSRSADAPAYQQGQNQLYNELNLGRREEYDVLDKRRGRDPEMGGKPQRRKNPQEGLYNELQKDKMAEAYSEIGMKGERRRGKGHDGLYQGLSTATKDTYDALHMQALPPRSRGSGATNFSLLKQAGDVEENPGPGIHMEQRGQNAPAASGARKRHGPGPREARGARPGPRVPKTLVLVVAAVLLLVSAESALITQQDLAPQQRAAPQQKRSSPSEGLCPPGHHISEDGRDCISCKYGQDYSTHWNDLLFCLRCTRCDSGEVELSPCTTTRNTVCQCEEGTFREEDSPEMCRKCRTGCPRGMVKVGDCTPWSDIECVHKESGTKHSGEVPAVEETVTSSPGTPASPCSLSGIIIGVTVAAVVLIVAVFVQLGLHIWQLRSQCMWPRETQLLLEVPPSTEDARSCQFPEEERGERSAEEKGRLGDLWV

SEQ ID NO: 3012 - protein, 946 aa, Artificial Sequence
  Synthetic Polypeptide
MALPVTALLLPLALLLHAARPDIQMTQTTSSLSASLGDRVTISCRASQDISKYLNWYQQKPDGTVKLLIYHTSRLHSGVPSRFSGSGSGTDYSLTISNLEQEDIATYFCQQGNTLPYTFGGGTKLEITLEGQPKANPTVTLFPPSSEELQANKATLVCLISDFYPGAVTVAWKADGSPVKAGVETTKPSKQSNNKYAASSYLSLTPEQWKSHRSYSCQVTHEGSTVEKTVAPTECSGRADCGITSASYHQGVLSATILYEILLGKATLYAVLVSALVLMAMVKRKDSRGRAKRSGSGATNFSLLKQAGDVEENPGPTSMDWIWRILFLVGAATGAHSFEVKLQESGPGLVAPSQSLSVTCTVSGVSLPDYGVSWIRQPPRKGLEWLGVIWGSETTYYNSALKSRLTIIKDNSKSQVFLKMNSLQTDDTAIYYCAKHYYYGGSYAMDYWGQGTSVTVSSTRASTKGPSVFPLAPSSKSTSGGTAALGCLVKDYFPEPVTVSWNSGALTSGVHTFPAVLQSSGLYSLSSVVTVPSSSLGTQTYICNVNHKPSNTKVDKRVEPKSCIPEDTFFPSSDVPCDVKLVEKSFETDTNLNFQNLSVIGFRILLLKVAGFNLLMTLRLWSSRAKRSGSGVKQTLNFDLLKLAGDVESNPGPSRGHMEQRGQNAPAASGARKRHGPGPREARGARPGPRVPKTLVLVVAAVLLLVSAESALITQQDLAPQQRAAPQQKRSSPSEGLCPPGHHISEDGRDCISCKYGQDYSTHWNDLLFCLRCTRCDSGEVELSPCTTTRNTVCQCEEGTFREEDSPEMCRKCRTGCPRGMVKVGDCTPWSDIECVHKESGTKHSGEVPAVEETVTSSPGTPASPCSLSGIIIGVTVAAVVLIVAVFVQLGLHIWQLRSQCMWPRETQLLLEVPPSTEDARSCQFPEEERGERSAEEKGRLGDLWV

SEQ ID NO: 3013 - protein, 968 aa, Artificial Sequence
  Synthetic Polypeptide
MALPVTALLLPLALLLHAARPDIQMTQTTSSLSASLGDRVTISCRASQDISKYLNWYQQKPDGTVKLLIYHTSRLHSGVPSRFSGSGSGTDYSLTISNLEQEDIATYFCQQGNTLPYTFGGGTKLEITLEGQPKANPTVTLFPPSSEELQANKATLVCLISDFYPGAVTVAWKADGSPVKAGVETTKPSKQSNNKYAASSYLSLTPEQWKSHRSYSCQVTHEGSTVEKTVAPTECSPIKTDVITMDPKDNCSKDANDTLLLQLTNTSAYYMYLLLLLKSVVYFAIITCCLLRRTAFCCNGEKSRAKRSGSGATNFSLLKQAGDVEENPGPTSMDWIWRILFLVGAATGAHSFEVKLQESGPGLVAPSQSLSVTCTVSGVSLPDYGVSWIRQPPRKGLEWLGVIWGSETTYYNSALKSRLTIIKDNSKSQVFLKMNSLQTDDTAIYYCAKHYYYGGSYAMDYWGQGTSVTVSSTRASTKGPSVFPLAPSSKSTSGGTAALGCLVKDYFPEPVTVSWNSGALTSGVHTFPAVLQSSGLYSLSSVVTVPSSSLGTQTYICNVNHKPSNTKVDKRVEPKSCEVKTDSTDHVKPKETENTKQPSKSCHKPKAIVHTEKVNMMSLTVLGLRMLFAKTVAVNFLLTAKLFFLRAKRSGSGVKQTLNFDLLKLAGDVESNPGPSRGHMEQRGQNAPAASGARKRHGPGPREARGARPGPRVPKTLVLVVAAVLLLVSAESALITQQDLAPQQRAAPQQKRSSPSEGLCPPGHHISEDGRDCISCKYGQDYSTHWNDLLFCLRCTRCDSGEVELSPCTTTRNTVCQCEEGTFREEDSPEMCRKCRTGCPRGMVKVGDCTPWSDIECVHKESGTKHSGEVPAVEETVTSSPGTPASPCSLSGIIIGVTVAAVVLIVAVFVQLGLHIWQLRSQCMWPRETQLLLEVPPSTEDARSCQFPEEERGERSAEEKGRLGDLWV

SEQ ID NO: 3014 - protein, 935 aa, Artificial Sequence
  Synthetic Polypeptide
MALPVTALLLPLALLLHAARPNAGVTQTPKFQVLKTGQSMTLQCAQDMNHEYMSWYRQDPGMGLRLIHYSVAIQTTDQGEVPNGYNVSRSTIEDFPLRLLSAAPSQTSVYFCASSYLGNTGELFFGEGSRLTVEDLKNVFPPEVAVFEPSKAEIAHTQKATLVCLATGFYPDHVELSWWVNGKEVHSGVCTDPQPLKEQPALNDSRYCLSSRLRVSATFWQNPRNHFRCQVQFYGLSENDEWTQDRAKPVTQIVSAEAWGRADCGITSASYHQGVLSATILYEILLGKATLYAVLVSALVLMAMVKRKDSRGRAKRSGSGATNFSLLKQAGDVEENPGPTSMDWIWRILFLVGAATGAHSNAGVTQTPKFQVLKTGQSMTLQCAQDMNHEYMSWYRQDPGMGLRLIHYSVAIQTTDQGEVPNGYNVSRSTIEDFPLRLLSAAPSQTSVYFCASSYLGNTGELFFGEGSRLTVIQNPDPAVYQLRDSKSSDKSVCLFTDFDSQTNVSQSKDSDVYITDKCVLDMRSMDFKSNSAVAWSNKSDFACANAFNNSIIPEDTFFPSSDVPCDVKLVEKSFETDTNLNFQNLSVIGFRILLLKVAGFNLLMTLRLWSSRAKRSGSGVKQTLNFDLLKLAGDVESNPGPSRGHMEQRGQNAPAASGARKRHGPGPREARGARPGPRVPKTLVLVVAAVLLLVSAESALITQQDLAPQQRAAPQQKRSSPSEGLCPPGHHISEDGRDCISCKYGQDYSTHWNDLLFCLRCTRCDSGEVELSPCTTTRNTVCQCEEGTFREEDSPEMCRKCRTGCPRGMVKVGDCTPWSDIECVHKESGTKHSGEVPAVEETVTSSPGTPASPCSLSGIIIGVTVAAVVLIVAVFVQLGLHIWQLRSQCMWPRETQLLLEVPPSTEDARSCQFPEEERGERSAEEKGRLGDLWV

SEQ ID NO: 3015 - protein, 938 aa, Artificial Sequence
  Synthetic Polypeptide
MLLLLVPVLEVIFTLGGTRAQSVTQLGSHVSVSEGALVLLRCNYSSSVPPYLFWYVQYPNQGLQLLLKHTTGATLVKGINGFEAEFKKSETSFHLTKPSAHMSDAAEYFCAVSDSRAAGNKLTFGGGTRVLVKPNIQNPDPAVYQLRDSKSSDKSVCLFTDFDSQTNVSQSKDSDVYITDKTVLDMRSMDFKSNSAVAWSNKSDFACANAFNNSIIPEDTFFPSPESSCDVKLVEKSFETDTNLNFQNLSVIGFRILLLKVAGFNLLMTLRLWSSRAKRSGSGATNFSLLKQAGDVEENPGPTSMGIRLLCRVAFCFLAVGLVDVKVTQSSRYLVKRTGEKVFLECVQDMDHENMFWYRQDPGLGLRLIYFSYDVKMKEKGDIPEGYSVSREKKERFSLILESASTNQTSMYLCASRFPGTAYNSPLHFGNGTRLTVTEDLNKVFPPEVAVFEPSEAEISHTQKATLVCLATGFFPDHVELSWWVNGKEVHSGVSTDPQPLKEQPALNDSRYCLSSRLRVSATFWQNPRNHFRCQVQFYGLSENDEWTQDRAKPVTQIVSAEAWGRADCGFTSVSYQQGVLSATILYEILLGKATLYAVLVSALVLMAMVKRKDFRAKRSGSGVKQTLNFDLLKLAGDVESNPGPSRGHMEQRGQNAPAASGARKRHGPGPREARGARPGPRVPKTLVLVVAAVLLLVSAESALITQQDLAPQQRAAPQQKRSSPSEGLCPPGHHISEDGRDCISCKYGQDYSTHWNDLLFCLRCTRCDSGEVELSPCTTTRNTVCQCEEGTFREEDSPEMCRKCRTGCPRGMVKVGDCTPWSDIECVHKESGTKHSGEVPAVEETVTSSPGTPASPCSLSGIIIGVTVAAVVLIVAVFVQLGLHIWQLRSQCMWPRETQLLLEVPPSTEDARSCQFPEEERGERSAEEKGRLGDLWV

SEQ ID NO: 3016 - protein, 6 aa, Artificial Sequence
  Synthetic Polypeptide
GGGGGG

SEQ ID NO: 3017 - protein, 863 aa, Artificial Sequence
  Synthetic Polypeptide
MALPVTALLLPLALLLHAARPDIQMTQTTSSLSASLGDRVTISCRASQDISKYLNWYQQKPDGTVKLLIYHTSRLHSGVPSRFSGSGSGTDYSLTISNLEQEDIATYFCQQGNTLPYTFGGGTKLEITGGGGSGGGGSGGGGSEVKLQESGPGLVAPSQSLSVTCTVSGVSLPDYGVSWIRQPPRKGLEWLGVIWGSETTYYNSALKSRLTIIKDNSKSQVFLKMNSLQTDDTAIYYCAKHYYYGGSYAMDYWGQGTSVTVSSRVEQKLISEEDLAKPTTTPAPRPPTPAPTIASQPLSLRPEACRPAAGGAVHTRGLDFACDIYIWAPLAGTCGVLLLSLVITLYCKRGRKKLLYIFKQPFMRPVQTTQEEDGCSCRFPEEEEGGCELRVKFSRSADAPAYQQGQNQLYNELNLGRREEYDVLDKRRGRDPEMGGKPRRKNPQEGLYNELQKDKMAEAYSEIGMKGERRRGKGHDGLYQGLSTATKDTYDALHMQALPPRSSGSGEGRGSLLTCGDVEENPGPHMEQRGQNAPAASGARKRHGPGPREARGARPGPRVPKTLVLVVAAVLLLVSAESALITQQDLAPQQRAAPQQKRSSPSEGLCPPGHHISEDGRDCISCKYGQDYSTHWNDLLFCLRCTRCDSGEVELSPCTTTRNTVCQCEEGTFREEDSPEMCRKCRTGCPRGMVKVGDCTPWSDIECVHKESGTKHSGEVPAVEETVTSSPGTPASPCSLSGIIIGVTVAAVVLIVAVFVRKINSEPLKDEFKNTGSGLLGMANIDLEKSRTGDEIILPRGLEYTVEECTCEDCIKSKPKVDSDHCFPLPAMEEGATILVTTKTNDYCKSLPAALSATEIEKSISAR

SEQ ID NO: 3018 - protein, 1021 aa, Artificial Sequence
  Synthetic Polypeptide
MALPVTALLLPLALLLHAARPDIQMTQTTSSLSASLGDRVTISCRASQDISKYLNWYQQKPDGTVKLLIYHTSRLHSGVPSRFSGSGSGTDYSLTISNLEQEDIATYFCQQGNTLPYTFGGGTKLEITLEGKPIPNPLLGLDSTGSGEDLKNVFPPEVAVFEPSKAEIAHTQKATLVCLATGFYPDHVELSWWVNGKEVHSGVCTDPQPLKEQPALNDSRYCLSSRLRVSATFWQNPRNHFRCQVQFYGLSENDEWTQDRAKPVTQIVSAEAWGRADCGITSASYHQGVLSATILYEILLGKATLYAVLVSALVLMAMVKRKDSRGRAKRSGSGATNFSLLKQAGDVEENPGPTSMDWIWRILFLVGAATGAHSFEVKLQESGPGLVAPSQSLSVTCTVSGVSLPDYGVSWIRQPPRKGLEWLGVIWGSETTYYNSALKSRLTIIKDNSKSQVFLKMNSLQTDDTAIYYCAKHYYYGGSYAMDYWGQGTSVTVSSTREQKLISEEDGSGIQNPDPAVYQLRDSKSSDKSVCLFTDFDSQTNVSQSKDSDVYITDKCVLDMRSMDFKSNSAVAWSNKSDFACANAFNNSIIPEDTFFPSSDVPCDVKLVEKSFETDTNLNFQNLSVIGFRILLLKVAGFNLLMTLRLWSSRAKRSGSGVKQTLNFDLLKLAGDVESNPGPSRGHMEQRGQNAPAASGARKRHGPGPREARGARPGPRVPKTLVLVVAAVLLLVSAESALITQQDLAPQQRAAPQQKRSSPSEGLCPPGHHISEDGRDCISCKYGQDYSTHWNDLLFCLRCTRCDSGEVELSPCTTTRNTVCQCEEGTFREEDSPEMCRKCRTGCPRGMVKVGDCTPWSDIECVHKESGTKHSGEVPAVEETVTSSPGTPASPCSLSGIIIGVTVAAVVLIVAVFVRKINSEPLKDEFKNTGSGLLGMANIDLEKSRTGDEIILPRGLEYTVEECTCEDCIKSKPKVDSDHCFPLPAMEEGATILVTTKTNDYCKSLPAALSATEIEKSISAR

SEQ ID NO: 3019 - protein, 827 aa, Artificial Sequence
  Synthetic Polypeptide
MALPVTALLLPLALLLHAARPDIQMTQTTSSLSASLGDRVTISCRASQDISKYLNWYQQKPDGTVKLLIYHTSRLHSGVPSRFSGSGSGTDYSLTISNLEQEDIATYFCQQGNTLPYTFGGGTKLEITGGGGSGGGGSGGGGSEVKLQESGPGLVAPSQSLSVTCTVSGVSLPDYGVSWIRQPPRKGLEWLGVIWGSETTYYNSALKSRLTIIKDNSKSQVFLKMNSLQTDDTAIYYCAKHYYYGGSYAMDYWGQGTSVTVSSRVEQKLISEEDLAKPTTTPAPRPPTPAPTIASQPLSLRPEACRPAAGGAVHTRGLDFACDIYIWAPLAGTCGVLLLSLVITLYCGRARVKFSRSADAPAYQQGQNQLYNELNLGRREEYDVLDKRRGRDPEMGGKPRRKNPQEGLYNELQKDKMAEAYSEIGMKGERRRGKGHDGLYQGLSTATKDTYDALHMQALPPRSRGSGATNFSLLKQAGDVEENPGPGIHMEQRGQNAPAASGARKRHGPGPREARGARPGPRVPKTLVLVVAAVLLLVSAESALITQQDLAPQQRAAPQQKRSSPSEGLCPPGHHISEDGRDCISCKYGQDYSTHWNDLLFCLRCTRCDSGEVELSPCTTTRNTVCQCEEGTFREEDSPEMCRKCRTGCPRGMVKVGDCTPWSDIECVHKESGTKHSGEVPAVEETVTSSPGTPASPCSLSGIIIGVTVAAVVLIVAVFVRKINSEPLKDEFKNTGSGLLGMANIDLEKSRTGDEIILPRGLEYTVEECTCEDCIKSKPKVDSDHCFPLPAMEEGATILVTTKTNDYCKSLPAALSATEIEKSISAR

SEQ ID NO: 3020 - protein, 815 aa, Artificial Sequence
  Synthetic Polypeptide
MALPVTALLLPLALLLHAARPDIQMTQTTSSLSASLGDRVTISCRASQDISKYLNWYQQKPDGTVKLLIYHTSRLHSGVPSRFSGSGSGTDYSLTISNLEQEDIATYFCQQGNTLPYTFGGGTKLEITGGGGSGGGGSGGGGSEVKLQESGPGLVAPSQSLSVTCTVSGVSLPDYGVSWIRQPPRKGLEWLGVIWGSETTYYNSALKSRLTIIKDNSKSQVFLKMNSLQTDDTAIYYCAKHYYYGGSYAMDYWGQGTSVTVSSRVDGNEEMGGITQTPYKVSISGTTVILTCPQYPGSEILWQHNDKNIGGDEDDKNIGSDEDHLSLKEFSELEQSGYYVCYPRGSKPEDANFYLYLRARVCENCMEMDVMSVATIVIVDICITGGLLLLVYYWSKNRKAKAKPVTRGAGAGGRQRGQNKERPPPVPNPDYEPIRKGQRDLYSGLNQRRISRGSGATNFSLLKQAGDVEENPGPGIHMEQRGQNAPAASGARKRHGPGPREARGARPGPRVPKTLVLVVAAVLLLVSAESALITQQDLAPQQRAAPQQKRSSPSEGLCPPGHHISEDGRDCISCKYGQDYSTHWNDLLFCLRCTRCDSGEVELSPCTTTRNTVCQCEEGTFREEDSPEMCRKCRTGCPRGMVKVGDCTPWSDIECVHKESGTKHSGEVPAVEETVTSSPGTPASPCSLSGIIIGVTVAAVVLIVAVFVRKINSEPLKDEFKNTGSGLLGMANIDLEKSRTGDEIILPRGLEYTVEECTCEDCIKSKPKVDSDHCFPLPAMEEGATILVTTKTNDYCKSLPAALSATEIEKSISAR

SEQ ID NO: 3021 - protein, 780 aa, Artificial Sequence
  Synthetic Polypeptide
MALPVTALLLPLALLLHAARPDIQMTQTTSSLSASLGDRVTISCRASQDISKYLNWYQQKPDGTVKLLIYHTSRLHSGVPSRFSGSGSGTDYSLTISNLEQEDIATYFCQQGNTLPYTFGGGTKLEITGGGGSGGGGSGGGGSEVKLQESGPGLVAPSQSLSVTCTVSGVSLPDYGVSWIRQPPRKGLEWLGVIWGSETTYYNSALKSRLTIIKDNSKSQVFLKMNSLQTDDTAIYYCAKHYYYGGSYAMDYWGQGTSVTVSSRVFKIPIEELEDRVFVNCNTSITWVEGTVGTLLSDITRLDLGKRILDPRGIYRCNGTDIYKDKESTVQVHYRMCQSCVELDPATVAGIIVTDVIATLLLALGVFCFAGHETGRLSGAADTQALLRNDQVYQPLRDRDDAQYSHLGGNWARNKSRGSGATNFSLLKQAGDVEENPGPGIHMEQRGQNAPAASGARKRHGPGPREARGARPGPRVPKTLVLVVAAVLLLVSAESALITQQDLAPQQRAAPQQKRSSPSEGLCPPGHHISEDGRDCISCKYGQDYSTHWNDLLFCLRCTRCDSGEVELSPCTTTRNTVCQCEEGTFREEDSPEMCRKCRTGCPRGMVKVGDCTPWSDIECVHKESGTKHSGEVPAVEETVTSSPGTPASPCSLSGIIIGVTVAAVVLIVAVFVRKINSEPLKDEFKNTGSGLLGMANIDLEKSRTGDEIILPRGLEYTVEECTCEDCIKSKPKVDSDHCFPLPAMEEGATILVTTKTNDYCKSLPAALSATEIEKSISAR

SEQ ID NO: 3022 - protein, 790 aa, Artificial Sequence
  Synthetic Polypeptide
MALPVTALLLPLALLLHAARPDIQMTQTTSSLSASLGDRVTISCRASQDISKYLNWYQQKPDGTVKLLIYHTSRLHSGVPSRFSGSGSGTDYSLTISNLEQEDIATYFCQQGNTLPYTFGGGTKLEITGGGGSGGGGSGGGGSEVKLQESGPGLVAPSQSLSVTCTVSGVSLPDYGVSWIRQPPRKGLEWLGVIWGSETTYYNSALKSRLTIIKDNSKSQVFLKMNSLQTDDTAIYYCAKHYYYGGSYAMDYWGQGTSVTVSSRVQSIKGNHLVKVYDYQEDGSVLLTCDAEAKNITWFKDGKMIGFLTEDKKKWNLGSNAKDPRGMYQCKGSQNKSKPLQVYYRMCQNCIELNAATISGFLFAEIVSIFVLAVGVYFIAGQDGVRQSRASDKQTLLPNDQLYQPLKDREDDQYSHLQGNQLRRNSRGSGATNFSLLKQAGDVEENPGPGIHMEQRGQNAPAASGARKRHGPGPREARGARPGPRVPKTLVLVVAAVLLLVSAESALITQQDLAPQQRAAPQQKRSSPSEGLCPPGHHISEDGRDCISCKYGQDYSTHWNDLLFCLRCTRCDSGEVELSPCTTTRNTVCQCEEGTFREEDSPEMCRKCRTGCPRGMVKVGDCTPWSDIECVHKESGTKHSGEVPAVEETVTSSPGTPASPCSLSGIIIGVTVAAVVLIVAVFVRKINSEPLKDEFKNTGSGLLGMANIDLEKSRTGDEIILPRGLEYTVEECTCEDCIKSKPKVDSDHCFPLPAMEEGATILVTTKTNDYCKSLPAALSATEIEKSISAR

SEQ ID NO: 3023 - protein, 773 aa, Artificial Sequence
  Synthetic Polypeptide
MALPVTALLLPLALLLHAARPDIQMTQTTSSLSASLGDRVTISCRASQDISKYLNWYQQKPDGTVKLLIYHTSRLHSGVPSRFSGSGSGTDYSLTISNLEQEDIATYFCQQGNTLPYTFGGGTKLEITGGGGSGGGGSGGGGSEVKLQESGPGLVAPSQSLSVTCTVSGVSLPDYGVSWIRQPPRKGLEWLGVIWGSETTYYNSALKSRLTIIKDNSKSQVFLKMNSLQTDDTAIYYCAKHYYYGGSYAMDYWGQGTSVTVSSRVQSFGLLDPKLCYLLDGILFIYGVILTALFLRVKFSRSADAPAYQQGQNQLYNELNLGRREEYDVLDKRRGRDPEMGGKPQRRKNPQEGLYNELQKDKMAEAYSEIGMKGERRRGKGHDGLYQGLSTATKDTYDALHMQALPPRSRGSGATNFSLLKQAGDVEENPGPGIHMEQRGQNAPAASGARKRHGPGPREARGARPGPRVPKTLVLVVAAVLLLVSAESALITQQDLAPQQRAAPQQKRSSPSEGLCPPGHHISEDGRDCISCKYGQDYSTHWNDLLFCLRCTRCDSGEVELSPCTTTRNTVCQCEEGTFREEDSPEMCRKCRTGCPRGMVKVGDCTPWSDIECVHKESGTKHSGEVPAVEETVTSSPGTPASPCSLSGIIIGVTVAAVVLIVAVFVRKINSEPLKDEFKNTGSGLLGMANIDLEKSRTGDEIILPRGLEYTVEECTCEDCIKSKPKVDSDHCFPLPAMEEGATILVTTKTNDYCKSLPAALSATEIEKSISAR

SEQ ID NO: 3024 - protein, 995 aa, Artificial Sequence
  Synthetic Polypeptide
MALPVTALLLPLALLLHAARPDIQMTQTTSSLSASLGDRVTISCRASQDISKYLNWYQQKPDGTVKLLIYHTSRLHSGVPSRFSGSGSGTDYSLTISNLEQEDIATYFCQQGNTLPYTFGGGTKLEITLEGQPKANPTVTLFPPSSEELQANKATLVCLISDFYPGAVTVAWKADGSPVKAGVETTKPSKQSNNKYAASSYLSLTPEQWKSHRSYSCQVTHEGSTVEKTVAPTECSGRADCGITSASYHQGVLSATILYEILLGKATLYAVLVSALVLMAMVKRKDSRGRAKRSGSGATNFSLLKQAGDVEENPGPTSMDWIWRILFLVGAATGAHSFEVKLQESGPGLVAPSQSLSVTCTVSGVSLPDYGVSWIRQPPRKGLEWLGVIWGSETTYYNSALKSRLTIIKDNSKSQVFLKMNSLQTDDTAIYYCAKHYYYGGSYAMDYWGQGTSVTVSSTRASTKGPSVFPLAPSSKSTSGGTAALGCLVKDYFPEPVTVSWNSGALTSGVHTFPAVLQSSGLYSLSSVVTVPSSSLGTQTYICNVNHKPSNTKVDKRVEPKSCIPEDTFFPSSDVPCDVKLVEKSFETDTNLNFQNLSVIGFRILLLKVAGFNLLMTLRLWSSRAKRSGSGVKQTLNFDLLKLAGDVESNPGPSRGHMEQRGQNAPAASGARKRHGPGPREARGARPGPRVPKTLVLVVAAVLLLVSAESALITQQDLAPQQRAAPQQKRSSPSEGLCPPGHHISEDGRDCISCKYGQDYSTHWNDLLFCLRCTRCDSGEVELSPCTTTRNTVCQCEEGTFREEDSPEMCRKCRTGCPRGMVKVGDCTPWSDIECVHKESGTKHSGEVPAVEETVTSSPGTPASPCSLSGIIIGVTVAAVVLIVAVFVRKINSEPLKDEFKNTGSGLLGMANIDLEKSRTGDEIILPRGLEYTVEECTCEDCIKSKPKVDSDHCFPLPAMEEGATILVTTKTNDYCKSLPAALSATEIEKSISAR

SEQ ID NO: 3025 - protein, 1017 aa, Artificial Sequence
  Synthetic Polypeptide
MALPVTALLLPLALLLHAARPDIQMTQTTSSLSASLGDRVTISCRASQDISKYLNWYQQKPDGTVKLLIYHTSRLHSGVPSRFSGSGSGTDYSLTISNLEQEDIATYFCQQGNTLPYTFGGGTKLEITLEGQPKANPTVTLFPPSSEELQANKATLVCLISDFYPGAVTVAWKADGSPVKAGVETTKPSKQSNNKYAASSYLSLTPEQWKSHRSYSCQVTHEGSTVEKTVAPTECSPIKTDVITMDPKDNCSKDANDTLLLQLTNTSAYYMYLLLLLKSVVYFAIITCCLLRRTAFCCNGEKSRAKRSGSGATNFSLLKQAGDVEENPGPTSMDWIWRILFLVGAATGAHSFEVKLQESGPGLVAPSQSLSVTCTVSGVSLPDYGVSWIRQPPRKGLEWLGVIWGSETTYYNSALKSRLTIIKDNSKSQVFLKMNSLQTDDTAIYYCAKHYYYGGSYAMDYWGQGTSVTVSSTRASTKGPSVFPLAPSSKSTSGGTAALGCLVKDYFPEPVTVSWNSGALTSGVHTFPAVLQSSGLYSLSSVVTVPSSSLGTQTYICNVNHKPSNTKVDKRVEPKSCEVKTDSTDHVKPKETENTKQPSKSCHKPKAIVHTEKVNMMSLTVLGLRMLFAKTVAVNFLLTAKLFFLRAKRSGSGVKQTLNFDLLKLAGDVESNPGPSRGHMEQRGQNAPAASGARKRHGPGPREARGARPGPRVPKTLVLVVAAVLLLVSAESALITQQDLAPQQRAAPQQKRSSPSEGLCPPGHHISEDGRDCISCKYGQDYSTHWNDLLFCLRCTRCDSGEVELSPCTTTRNTVCQCEEGTFREEDSPEMCRKCRTGCPRGMVKVGDCTPWSDIECVHKESGTKHSGEVPAVEETVTSSPGTPASPCSLSGIIIGVTVAAVVLIVAVFVRKINSEPLKDEFKNTGSGLLGMANIDLEKSRTGDEIILPRGLEYTVEECTCEDCIKSKPKVDSDHCFPLPAMEEGATILVTTKTNDYCKSLPAALSATEIEKSISAR

SEQ ID NO: 3026 - protein, 984 aa, Artificial Sequence
  Synthetic Polypeptide
MALPVTALLLPLALLLHAARPNAGVTQTPKFQVLKTGQSMTLQCAQDMNHEYMSWYRQDPGMGLRLIHYSVAIQTTDQGEVPNGYNVSRSTIEDFPLRLLSAAPSQTSVYFCASSYLGNTGELFFGEGSRLTVEDLKNVFPPEVAVFEPSKAEIAHTQKATLVCLATGFYPDHVELSWWVNGKEVHSGVCTDPQPLKEQPALNDSRYCLSSRLRVSATFWQNPRNHFRCQVQFYGLSENDEWTQDRAKPVTQIVSAEAWGRADCGITSASYHQGVLSATILYEILLGKATLYAVLVSALVLMAMVKRKDSRGRAKRSGSGATNFSLLKQAGDVEENPGPTSMDWIWRILFLVGAATGAHSNAGVTQTPKFQVLKTGQSMTLQCAQDMNHEYMSWYRQDPGMGLRLIHYSVAIQTTDQGEVPNGYNVSRSTIEDFPLRLLSAAPSQTSVYFCASSYLGNTGELFFGEGSRLTVIQNPDPAVYQLRDSKSSDKSVCLFTDFDSQTNVSQSKDSDVYITDKCVLDMRSMDFKSNSAVAWSNKSDFACANAFNNSIIPEDTFFPSSDVPCDVKLVEKSFETDTNLNFQNLSVIGFRILLLKVAGFNLLMTLRLWSSRAKRSGSGVKQTLNFDLLKLAGDVESNPGPSRGHMEQRGQNAPAASGARKRHGPGPREARGARPGPRVPKTLVLVVAAVLLLVSAESALITQQDLAPQQRAAPQQKRSSPSEGLCPPGHHISEDGRDCISCKYGQDYSTHWNDLLFCLRCTRCDSGEVELSPCTTTRNTVCQCEEGTFREEDSPEMCRKCRTGCPRGMVKVGDCTPWSDIECVHKESGTKHSGEVPAVEETVTSSPGTPASPCSLSGIIIGVTVAAVVLIVAVFVRKINSEPLKDEFKNTGSGLLGMANIDLEKSRTGDEIILPRGLEYTVEECTCEDCIKSKPKVDSDHCFPLPAMEEGATILVTTKTNDYCKSLPAALSATEIEKSISAR

SEQ ID NO: 3027 - protein, 987 aa, Artificial Sequence
  Synthetic Polypeptide
MLLLLVPVLEVIFTLGGTRAQSVTQLGSHVSVSEGALVLLRCNYSSSVPPYLFWYVQYPNQGLQLLLKHTTGATLVKGINGFEAEFKKSETSFHLTKPSAHMSDAAEYFCAVSDSRAAGNKLTFGGGTRVLVKPNIQNPDPAVYQLRDSKSSDKSVCLFTDFDSQTNVSQSKDSDVYITDKTVLDMRSMDFKSNSAVAWSNKSDFACANAFNNSIIPEDTFFPSPESSCDVKLVEKSFETDTNLNFQNLSVIGFRILLLKVAGFNLLMTLRLWSSRAKRSGSGATNFSLLKQAGDVEENPGPTSMGIRLLCRVAFCFLAVGLVDVKVTQSSRYLVKRTGEKVFLECVQDMDHENMFWYRQDPGLGLRLIYFSYDVKMKEKGDIPEGYSVSREKKERFSLILESASTNQTSMYLCASRFPGTAYNSPLHFGNGTRLTVTEDLNKVFPPEVAVFEPSEAEISHTQKATLVCLATGFFPDHVELSWWVNGKEVHSGVSTDPQPLKEQPALNDSRYCLSSRLRVSATFWQNPRNHFRCQVQFYGLSENDEWTQDRAKPVTQIVSAEAWGRADCGFTSVSYQQGVLSATILYEILLGKATLYAVLVSALVLMAMVKRKDFRAKRSGSGVKQTLNFDLLKLAGDVESNPGPSRGHMEQRGQNAPAASGARKRHGPGPREARGARPGPRVPKTLVLVVAAVLLLVSAESALITQQDLAPQQRAAPQQKRSSPSEGLCPPGHHISEDGRDCISCKYGQDYSTHWNDLLFCLRCTRCDSGEVELSPCTTTRNTVCQCEEGTFREEDSPEMCRKCRTGCPRGMVKVGDCTPWSDIECVHKESGTKHSGEVPAVEETVTSSPGTPASPCSLSGIIIGVTVAAVVLIVAVFVRKINSEPLKDEFKNTGSGLLGMANIDLEKSRTGDEIILPRGLEYTVEECTCEDCIKSKPKVDSDHCFPLPAMEEGATILVTTKTNDYCKSLPAALSATEIEKSISAR

SEQ ID NO: 3028 - protein, 17 aa, Artificial Sequence
  Synthetic Polypeptide
GGGGGGGGGGGGGGGGG

SEQ ID NO: 3029 - protein, 17 aa, Artificial Sequence
  Synthetic Polypeptide
GGGGGGGGGGGGGGGGG

SEQ ID NO: 3030 - protein, 17 aa, Artificial Sequence
  Synthetic Polypeptide
GGGGGGGGGGGGGGGGG

SEQ ID NO: 3031 - protein, 17 aa, Artificial Sequence
  Synthetic Polypeptide
GGGGGGGGGGGGGGGGG

SEQ ID NO: 3032 - protein, 17 aa, Artificial Sequence
  Synthetic Polypeptide
GGGGGGGGGGGGGGGGG

SEQ ID NO: 3033 - protein, 17 aa, Artificial Sequence
  Synthetic Polypeptide
GGGGGGGGGGGGGGGGG

SEQ ID NO: 3034 - protein, 17 aa, Artificial Sequence
  Synthetic Polypeptide
GGGGGGGGGGGGGGGGG

SEQ ID NO: 3035 - protein, 17 aa, Artificial Sequence
  Synthetic Polypeptide
GGGGGGGGGGGGGGGGG

SEQ ID NO: 3036 - protein, 17 aa, Artificial Sequence
  Synthetic Polypeptide
GGGGGGGGGGGGGGGGG

SEQ ID NO: 3037 - protein, 17 aa, Artificial Sequence
  Synthetic Polypeptide
GGGGGGGGGGGGGGGGG

SEQ ID NO: 3038 - protein, 269 aa, Artificial Sequence
  Synthetic Polypeptide
EPLVVKVEEGDNAVLQCLKGTSDGPTQQLTWSRESPLKPFLKLSLGLPGLGIHMRPLAIWLFIFNVSQQMGGFYLCQPGPPSEKAWQPGWTVNVEGSGELFRWNVSDLGGLGCGLKNRSSEGPSSPSGKLMSPKLYVWAKDRPEIWEGEPPCLPPRDSLNQSLSQDLTMAPGSTLWLSCGVPPDSVSRGPLSWTHVHPKGPKSLLSLELKDDRPARDMWVMETGLLLPRATAQDAGKYYCHRGNLTMSFHLEITARPVLWHWLLRTGGW

SEQ ID NO: 3039 - protein, 473 aa, Artificial Sequence
  Synthetic Polypeptide
QNLAQVSSQDVSLLASDSEPLKCFSRTFEDLTCFWDEEEAAPSGTYQLLYAYPREKPRACPLSSQSMPHFGTRYVCQFPDQEEVRLFFPLHLWVKNVFLNQTRTQRVLFVDSVGLPAPPSIIKAMGGSQPGELQISWEEPAPEISDFLRYELRYGPRDPKNSTGPTVIQLIATETCCPALQRPHSASALDQSPCAQPTMPWQDGPKQTSPSREASALTAEGGSCLISGLQPGNSYWLQLRSEPDGISLGGSWGSWSLPVTVDLPGDAVALGLQCFTLDLKNVTCQWQQQDHASSQGFFYHSRARCCPRDRYPIWENCEEEEKTNPGLQTPQFSRCHFKSRNDSIIHILVEVTTAPGTVHSYLGSPFWIHQAVRLPTPNLHWREISSGHLELEWQHPSSWAAQETCYQLRYTGEGHQDWKVLEPPLGARGGTLELRPRSRYRLQLRARLNGPTYQGPWSSWSDPTRVETATETA

SEQ ID NO: 3040 - protein, 146 aa, Artificial Sequence
  Synthetic Polypeptide
GWFLDSPDRPWNPPTFSPALLVVTEGDNATFTCSFSNTSESFVLNWYRMSPSNQTDKLAAFPEDRSQPGQDCRFRVTQLPNGRDFHMSVVRARRNDSGTYLCGAISLAPKAQIKESLRAELRVTERRAEVPTAHPSPSPRPAGQFQ

SEQ ID NO: 3041 - protein, 162 aa, Artificial Sequence
  Synthetic Polypeptide
MACLGFQRHKAQLNLATRTWPCTLLFFLLFIPVFCKAMHVAQPAVVLASSRGIASFVCEYASPGKATEVRVTVLRQADSQVTEVCAATYMMGNELTFLDDSICTGTSSGNQVNLTIQGLRAMDTGLYICKVELMYPPPYYLGIGNGTQIYVIDPEPCPDSDF

SEQ ID NO: 3042 - protein, 241 aa, Artificial Sequence
  Synthetic Polypeptide
MRRAALWLWLCALALSLQPALPQIVATNLPPEDQDGSGDDSDNFSGSGAGALQDITLSQQTPSTWKDTQLLTAIPTSPEPTGLEATAASTSTLPAGEGPKEGEAVVLPEVEPGLTAREQEATPRPRETTQLPTTHQASTTTATTAQEPATSHPHRDMQPGHHETSTPAGPSQADLHTPHTEDGGPSATERAAEDGASSQLPAAEGSGEQDFTFETSGENTAVVAVEPDRRNQSPVDQGATG

SEQ ID NO: 3043 - protein, 283 aa, Artificial Sequence
  Synthetic Polypeptide
QTKEDPNPPITNLRMKAKAQQLTWDLNRNVTDIECVKDADYSMPAVNNSYCQFGAISLCEVTNYTVRVANPPFSTWILFPENSGKPWAGAENLTCWIHDVDFLSCSWAVGPGAPADVQYDLYLNVANRRQQYECLHYKTDAQGTRIGCRFDDISRLSSGSQSSHILVRGRSAAFGIPCTDKFVVFSQIEILTPPNMTAKCNKTHSFMHWKMRSHFNRKFRYELQIQKRMQPVITEQVRDRTSFQLLNPGTYTVQIRARERVYEFLSAWSTPQRFECDQEEGAN

SEQ ID NO: 3044 - protein, 694 aa, Artificial Sequence
  Synthetic Polypeptide
QVSSWLCQEPEPCHPGFDAESYTFTVPRRHLERGRVLGRVNFEDCTGRQRTAYFSLDTRFKVGTDGVITVKRPLRFHNPQIHFLVYAWDSTYRKFSTKVTLNTVGHHHRPPPHQASVSGIQAELLTFPNSSPGLRRQKRDWVIPPISCPENEKGPFPKNLVQIKSNKDKEGKVFYSITGQGADTPPVGVFIIERETGWLKVTEPLDRERIATYTLFSHAVSSNGNAVEDPMEILITVTDQNDNKPEFTQEVFKGSVMEGALPGTSVMEVTATDADDDVNTYNAAIAYTILSQDPELPDKNMFTINRNTGVISVVTTGLDRESFPTYTLVVQAADLQGEGLSTTATAVITVTDTNDNPPIFNPTTYKGQVPENEANVVITTLKVTDADAPNTPAWEAVYTILNDDGGQFVVTTNPVNNDGILKTAKGLDFEAKQQYILHVAVTNVVPFEVSLTTSTATVTVDVLDVNEAPIFVPPEKRVEVSEDFGVGQEITSYTAQEPDTFMEQKITYRIWRDTANWLEINPDTGAISTRAELDREDFEHVKNSTYTALIIATDNGSPVATGTGTLLLILSDVNDNAPIPEPRTIFFCERNPKPQVINIIDADLPPNTSPFTAELTHGASANWTIQYNDPTQESIILKPKMALEVGDYKINLKLMDNQNKDQVTTLEVSVCDCEGAAGVCRKAQPVEAGLQIPA

SEQ ID NO: 3045 - protein, 224 aa, Artificial Sequence
  Synthetic Polypeptide
ASSSSCMGGKQMTQNYSTIFAEGNISQPVLMDINAVLCCPPIALRNLIIITWEIILRGQPSCTKAYKKETNETKETNCTVERITWVSRPDQNSDLQILPVDTTHDGYYRGIVVTPDGNFHRGYHLQVLVTPEVNLFQSRNITAVCKAVTGKPAAQISWIPEGSILATKQEYWGNGTVTVKSTCPWEGHKSTVTCHVSHLTGNKSLSVKLNSGLRTSGSPALSLL

SEQ ID NO: 3046 - protein, 472 aa, Artificial Sequence
  Synthetic Polypeptide
LPLDAAKRFHDVLGNERPSAYMREHNQLNGWSSDENDWNEKLYPVWKRGDMRWKNSWKGGRVQAVLTSDSPALVGSNITFAVNLIFPRCQKEDANGNIVYEKNCRNEAGLSADPYVYNWTAWSEDSDGENGTGQSHHNVFPDGKPFPHHPGWRRWNFIYVFHTLGQYFQKLGRCSVRVSVNTANVTLGPQLMEVTVYRRHGRAYVPIAQVKDVYVVTDQIPVFVTMFQKNDRNSSDETFLKDLPIMFDVLIHDPSHFLNYSTINYKWSFGDNTGLFVSTNHTVNHTYVLNGTFSLNLTVKAAAPGPCPPPPPPPRPSKPTPSLGPAGDNPLELSRIPDENCQINRYGHFQATITIVEGILEVNIIQMTDVLMPVPWPESSLIDFVVTCQGSIPTEVCTIISDPTCEITQNTVCSPVDVDEMCLLTVRRTFNGSGTYCVNLTLGDDTSLALTSTLISVPDRDPASPLRMANSA

SEQ ID NO: 3047 - protein, 639 aa, Artificial Sequence
  Synthetic Polypeptide
GGTQTAIVFIKQPSSQDALQGRRALLRCEVEAPGPVHVYWLLDGAPVQDTERRFAQGSSLSFAAVDRLQDSGTFQCVARDDVTGEEARSANASFNIKWIEAGPVVLKHPASEAEIQPQTQVTLRCHIDGHPRPTYQWFRDGTPLSDGQSNHTVSSKERNLTLRPAGPEHSGLYSCCAHSAFGQACSSQNFTLSIADESFARVVLAPQDVVVARYEEAMFHCQFSAQPPPSLQWLFEDETPITNRSRPPHLRRATVFANGSLLLTQVRPRNAGIYRCIGQGQRGPPIILEATLHLAEIEDMPLFEPRVFTAGSEERVTCLPPKGLPEPSVWWEHAGVRLPTHGRVYQKGHELVLANIAESDAGVYTCHAANLAGQRRQDVNITVATVPSWLKKPQDSQLEEGKPGYLDCLTQATPKPTVVWYRNQMLISEDSRFEVFKNGTLRINSVEVYDGTWYRCMSSTPAGSIEAQARVQVLDGSSLPEWVTDNAGTLHFARVTRDDAGNYTCIASNGPQGQIRAHVQLTVAVFITFKVEPERTTVYQGHTALLQCEAQGDPKPLIQWKGKDRILDPTKLGPRMHIFQNGSLVIHDVAPEDSGRYTCIAGNSCNIKHTEAPLYVVDKPVPEESEGPGSPPPYKMIQT

SEQ ID NO: 3048 - protein, 237 aa, Artificial Sequence
  Synthetic Polypeptide
AMDPNFWLQVQESVTVQEGLCVLVPCTFFHPIPYYDKNSPVHGYWFREGAIISGDSPVATNKLDQEVQEETQGRFRLLGDPSRNNCSLSIVDARRRDNGSYFFRMERGSTKYSYKSPQLSVHVTDLTHRPKILIPGTLEPGHSKNLTCSVSWACEQGTPPIFSWLSAAPTSLGPRTTHSSVLIITPRPQDHGTNLTCQVKFAGAGVTTERTIQLNVTYVPQNPTTGIFPGDGSGKQE

SEQ ID NO: 3049 - protein, 264 aa, Artificial Sequence
  Synthetic Polypeptide
PSGFMSLDNNGTATPELPTQGTFSNVSTNVSYQETTTPSTLGSTSLHPVSQHGNEATTNITETTVKFTSTSVITSVYGNTNSSVQSQTSVISTVFTTPANVSTPETTLKPSLSPGNVSDLSTTSTSLATSPTKPYTSSSPILSDIKAEIKCSGIREVKLTQGICLEQNKTSSCAEFKKDRGEGLARVLCGEEQADADAGAQVCSLLLAQSEVRPQCLLLVLANRTEISSKLQLMKKHQSDLKKLGILDFTEQDVASHQSYSQKT

SEQ ID NO: 3050 - protein, 253 aa, Artificial Sequence
  Synthetic Polypeptide
ATATFAAAQEECVCENYKLAVNCFVNNNRQCQCTSVGAQNTVICSKLAAKCLVMKAEMNGSKLGRRAKPEGALQNNDGLYDPDCDESGLFKAKQCNGTSTCWCVNTAGVRRTDKDTEITCSERVRTYWIIIELKHKAREKPYDSKSLRTALQKEITTRYQLDPKFITSILYENNVITIDLVQNSSQKTQNDVDIADVAYYFEKDVKGESLFHSKKMDLTVNGEQLDLDPGQTLIYYVDEKAPEFSMQGLKQAR

SEQ ID NO: 3051 - protein, 208 aa, Artificial Sequence
  Synthetic Polypeptide
GVLASMFHVTLKIEMKKMNKLQNISEELQRNISLQLMSNMNISNKIRNLSTTLQTIATKLCRELYSKEQEHKCKPCPRRWIWHKDSCYFLSDDVQTWQESKMACAAQNASLLKINNKNALEFIKSQSRSYDYWLGLSPEEDSTRGMRVDNIINSSAWVIRNAPDLNNMYCGYINRLYVQYYHCTYKQRMICEKMANPVQLGSTYFREA

SEQ ID NO: 3052 - protein, 142 aa, Artificial Sequence
  Synthetic Polypeptide
FECPAGIYAPICSGGGGSCGGGGSKISHFLKMESLNFIRAHTPYINIYNCEPANPSEKNSPSTQYCYSIQSGGGGSCGGGGSPAGIYAPIGGGGSKISHFLKMESLNFIRAHTPYINIYNCEPANPSEKNSPSTQYCYSIQS

SEQ ID NO: 3053 - protein, 84 aa, Artificial Sequence
  Synthetic Polypeptide
FECPAGIYAPICSGGGGSCGGGGSKISHFLKMESLNFIRAHTPYINIYNCEPANPSEKNSPSTQYCYSIQSGGGGSCGGGGSTR

SEQ ID NO: 3054 - protein, 494 aa, Artificial Sequence
  Synthetic Polypeptide
TIKSVFTRSELKFSPQWSHHGKIVTCQLQDADGKFLSNDTVQLNVKHTPKLEIKVTPSDAIVREGDSVTMTCEVSSSNPEYTTVSWLKDGTSLKKQNTFTLNLREVTKDQSGKYCCQVSNDVGPGRSEEVFLQVQYAPEPSTVQILHSPAVEGSQVEFLCMSLANPLPTNYTWYHNGKEMQGRTEEKVHIPKILPWHAGTYSCVAENILGTGQRGPGAELDVQYPPKKVTTVIQNPMPIREGDTVTLSCNYNSSNPSVTRYEWKPHGAWEEPSLGVLKIQNVGWDNTTIACAACNSWCSWASPVALNVQYAPRDVRVRKIKPLSEIHSGNSVSLQCDFSSSHPKEVQFFWEKNGRLLGKESQLNFDSISPEDAGSYSCWVNNSIGQTASKAWTLEVLYAPRRLRVSMSPGDQVMEGKSATLTCESDANPPVSHYTWFDWNNQSLPYHSQKLRLEPVKVQHSGAYWCQGTNSVGKGRSPLSTLTVYYSPETIGRR

SEQ ID NO: 3055 - protein, 396 aa, Artificial Sequence
  Synthetic Polypeptide
DLGGMGCSSPPCECHQEEDFRVTCKDIQRIPSLPPSTQTLKLIETHLRTIPSHAFSNLPNISRIYVSIDVTLQQLESHSFYNLSKVTHIEIRNTRNLTYIDPDALKELPLLKFLGIFNTGLKMFPDLTKVYSTDIFFILEITDNPYMTSIPVNAFQGLCNETLTLKLYNNGFTSVQGYAFNGTKLDAVYLNKNKYLTVIDKDAFGGVYSGPSLLDVSQTSVTALPSKGLEHLKELIARNTWTLKKLPLSLSFLHLTRADLSYPSHCCAFKNQKKIRGILESLMCNESSMQSLRQRKSVNALNSPLHQEYEENLGDSIVGYKEKSKFQDTHNNAHYYVFFEEQEDEIIGFGQELKNPQEETLQAFDSHYDYTICGDSEDMVCTPKSDEFNPCEDIMG

SEQ ID NO: 3056 - protein, 345 aa, Artificial Sequence
  Synthetic Polypeptide
ALCPASRALEEKKGNYVVTDHGSCVRACGADSYEMEEDGVRKCKKCEGPCRKVCNGIGIGEFKDSLSINATNIKHFKNCTSISGDLHILPVAFRGDSFTHTPPLDPQELDILKTVKEITGFLLIQAWPENRTDLHAFENLEIIRGRTKQHGQFSLAVVSLNITSLGLRSLKEISDGDVIISGNKNLCYANTINWKKLFGTSGQKTKIISNRGENSCKATGQVCHALCSPEGCWGPEPRDCVSCRNVSRGRECVDKCNLLEGEPREFVENSECIQCHPECLPQAMNITCTGRGPDNCIQCAHYIDGPHCVKTCPAGVMGENNTLVWKYADAGHVCHLCHPNCTYGC

SEQ ID NO: 3057 - protein, 54 aa, Artificial Sequence; identical to SEQ ID NO: 2425
  Synthetic Polypeptide

SEQ ID NO: 3058 - protein, 209 aa, Artificial Sequence
  Synthetic Polypeptide
TGSAASGPVKELVGSVGGAVTFPLKSKVKQVDSIVWTFNTTPLVTIQPEGGTIIVTQNRNRERVDFPDGGYSLKLSKLKKNDSGIYYVGIYSSSLQQPSTQEYVLHVYEHLSKPKVTMGLQSNKNGTCVTNLTCCMEHGEEDVIYTWKALGQAANESHNGSILPISWRWGESDMTFICVARNPVSRNFSSPILARKLCEGAADDPDSSM

SEQ ID NO: 3059 - protein, 135 aa, Artificial Sequence
  Synthetic Polypeptide
LFNQEVQIPLTESYCGPCPKNWICYKNNCYQFFDESKNWYESQASCMSQNASLLKVYSKEDQDLLKLVKSYHWMGLVHIPTNGSWQWEDGSILSPNLLTIIEMQKGDCALYASSFKGYIENCSTPNTYICMQRTV
